United States Patent Application Publication US 2024/0254659 A1 - sequence listing, part 4

SEQ ID NO: 40737 - protein, 85 aa, unidentified
  REGION 1..85: note = Description of Unknown:cds_NC_030656.1_cds_YP_009268827.1_112 target sequence
SYFSYYNPFSEFEGGAGVLDDELFTEDEQQSFLPRDDISSIIDGKPISPLAPYNILQFEDIRVLLGLILFVLAITSAPLVGLCLI

SEQ ID NO: 40738 - protein, 85 aa, unidentified
  REGION 1..85: note = Description of Unknown:cds_NC_030656.1_cds_YP_009268827.1_112 target sequence
GLAAIVLPLPCLVLAYCLSMQAIYSSYNKTLGMAIICSLMAILAITLTHITCSYHVTVISYIILGVLFCMYVFRLSYFSTPQACP

SEQ ID NO: 40739 - protein, 84 aa, unidentified
  REGION 1..84: note = Description of Unknown:cds_NC_030656.1_cds_YP_009268827.1_112 target sequence
SMQAIYSSYNKTLGMAIICSLMAILAITLTHITCSYHVTVISYIILGVLFCMYVFRLSYFSTPQACPLMRAGRKTSFSASFSDT

SEQ ID NO: 40740 - protein, 85 aa, unidentified
  REGION 1..85: note = Description of Unknown:cds_NC_030656.1_cds_YP_009268827.1_112 target sequence
EQQSFLPRDDISSIIDGKPISPLAPYNILQFEDIRVLLGLILFVLAITSAPLVGLCLIGLAAIVLPLPCLVLAYCLSMQAIYSSY

SEQ ID NO: 40741 - protein, 85 aa, unidentified
  REGION 1..85: note = Description of Unknown:cds_NC_035464.1_cds_YP_009408150.1_4 target sequence
QASPDMGALTRAGYRVTARWTWNDVTRAMYCFETSRTANDFVGCVKKRRTDALAVYRYLRDVQSHQGLIYEVLPPAFQGNPEEEE

SEQ ID NO: 40742 - protein, 85 aa, unidentified
  REGION 1..85: note = Description of Unknown:cds_NC_035464.1_cds_YP_009408150.1_4 target sequence
GEGEETCITFVVYDTGYFFLWVDPNQILQDALDANATMRIKYPGAYRVITTPYDLDFSQIAWRPIVPSGEDYVICSNMDRVDFSD

SEQ ID NO: 40743 - protein, 84 aa, unidentified
  REGION 1..84: note = Description of Unknown:cds_NC_035464.1_cds_YP_009408150.1_4 target sequence
FLWVDPNQILQDALDANATMRIKYPGAYRVITTPYDLDFSQIAWRPIVPSGEDYVICSNMDRVDFSDAIDRYVRQLKAIMGAIS

SEQ ID NO: 40744 - protein, 85 aa, unidentified
  REGION 1..85: note = Description of Unknown:cds_NC_035464.1_cds_YP_009408150.1_4 target sequence
AMYCFETSRTANDFVGCVKKRRTDALAVYRYLRDVQSHQGLIYEVLPPAFQGNPEEEEGEGEETCITFVVYDTGYFFLWVDPNQI

SEQ ID NO: 40745 - protein, 85 aa, unidentified
  REGION 1..85: note = Description of Unknown:hvTR_D0Z5S8 target sequence
SILVSPSNNTGWGLGAGRMYGGAKTRSSQHPVRVRGHYRAPWGAHTRGRTGRTTVDDVIDSVVADARKYRPPANTAGSTVDAVID

SEQ ID NO: 40746 - protein, 85 aa, unidentified
  REGION 1..85: note = Description of Unknown:hvTR_D0Z5S8 target sequence
EVVANARAYARRRRRPRRRRPTAAVRAARALVRRARRVGRRAMLRAARQAVTPAGRARRQAAAAAATAIANLAAPRRGNVYWVRD

SEQ ID NO: 40747 - protein, 84 aa, unidentified
  REGION 1..84: note = Description of Unknown:hvTR_D0Z5S8 target sequence
RRRPTAAVRAARALVRRARRVGRRAMLRAARQAVTPAGRARRQAAAAAATAIANLAAPRRGNVYWVRDAVTGTRVPVRTRPPHP

SEQ ID NO: 40748 - protein, 85 aa, unidentified
  REGION 1..85: note = Description of Unknown:hvTR_D0Z5S8 target sequence
SQHPVRVRGHYRAPWGAHTRGRTGRTTVDDVIDSVVADARKYRPPANTAGSTVDAVIDEVVANARAYARRRRRPRRRRPTAAVRA

SEQ ID NO: 40749 - protein, 85 aa, unidentified
  REGION 1..85: note = Description of Unknown:hvTR_Q6WB97 target sequence
SRKAPCKYEVRGKCNRGSECKFNHNYWSWPDRYLLIRSNYLLNQLLRNTDRADGLSIISGAGREDRTQDFVLGSTNVVQGYIDDN

SEQ ID NO: 40750 - protein, 85 aa, unidentified
  REGION 1..85: note = Description of Unknown:hvTR_Q6WB97 target sequence
QSITKAAACYSLHNIIKQLQEVEVRQARDSKLSDSKHVALHNLILSYMEMSKTPASLINNLKRLPREKLKKLAKLIIDLSAGADN

SEQ ID NO: 40751 - protein, 84 aa, unidentified
  REGION 1..84: note = Description of Unknown:hvTR_Q6WB97 target sequence
QLQEVEVRQARDSKLSDSKHVALHNLILSYMEMSKTPASLINNLKRLPREKLKKLAKLIIDLSAGADNDSSYALQDSESINQVQ

SEQ ID NO: 40752 - protein, 85 aa, unidentified
  REGION 1..85: note = Description of Unknown:hvTR_Q6WB97 target sequence
SWPDRYLLIRSNYLLNQLLRNTDRADGLSIISGAGREDRTQDFVLGSTNVVQGYIDDNQSITKAAACYSLHNIIKQLQEVEVRQA

SEQ ID NO: 40753 - protein, 85 aa, unidentified
  REGION 1..85: note = Description of Unknown:cds_NZ_WFIY01000004.1_cds_WP_155862706.1_506 target sequence
NRLDKNLLIYLPTSVIPIAGSTIYSVITINKIRDFVEALPYIFLGLPASLLTSAVLTFEYFKQFLYVVLLIVLLAPFISSFTISR

SEQ ID NO: 40754 - protein, 85 aa, unidentified
  REGION 1..85: note = Description of Unknown:cds_NZ_WFIY01000004.1_cds_WP_155862706.1_506 target sequence
TYENVEVVPNEYYIEITLKVPISYSQFSDPNALFEKIFNKALKKMKNPYYYYKLRSLGNCSNLKVEVHEDKIVLRKRCGDTIVEI

SEQ ID NO: 40755 - protein, 84 aa, unidentified
  REGION 1..84: note = Description of Unknown:cds_NZ_WFIY01000004.1_cds_WP_155862706.1_506 target sequence
LKVPISYSQFSDPNALFEKIFNKALKKMKNPYYYYKLRSLGNCSNLKVEVHEDKIVLRKRCGDTIVEINLSNKDEAYMKVSISY

SEQ ID NO: 40756 - protein, 85 aa, unidentified
  REGION 1..85: note = Description of Unknown:cds_NZ_WFIY01000004.1_cds_WP_155862706.1_506 target sequence
TINKIRDFVEALPYIFLGLPASLLTSAVLTFEYFKQFLYVVLLIVLLAPFISSFTISRTYENVEVVPNEYYIEITLKVPISYSQF

SEQ ID NO: 40757 - protein, 85 aa, unidentified
  REGION 1..85: note = Description of Unknown:cds_NZ_WFIY01000004.1_cds_WP_155862746.1_557 target sequence
LVSITIKDVLPWREYEKIRMNEIRKISEIKKSRRVELGDRLSLLFENKDTVLHQIQEMIYLDRLEKENDIEEVIRIYSSLLPGNG

SEQ ID NO: 40758 - protein, 85 aa, unidentified
  REGION 1..85: note = Description of Unknown:cds_NZ_WFIY01000004.1_cds_WP_155862746.1_557 target sequence
KIKATLYIYAYSMNDLINVYKTLNKVYNSVFLKIGSKLIQGEPEAGREQGESFSTVQYLTFDLQGERSTNMEIHVLHENYKVTAK

SEQ ID NO: 40759 - protein, 84 aa, unidentified
  REGION 1..84: note = Description of Unknown:cds_NZ_WFIY01000004.1_cds_WP_155862746.1_557 target sequence
VYKTLNKVYNSVFLKIGSKLIQGEPEAGREQGESFSTVQYLTFDLQGERSTNMEIHVLHENYKVTAKIPEELAKKLLKEAYDES

SEQ ID NO: 40760 - protein, 85 aa, unidentified
  REGION 1..85: note = Description of Unknown:cds_NZ_WFIY01000004.1_cds_WP_155862746.1_557 target sequence
EIKKSRRVELGDRLSLLFENKDTVLHQIQEMIYLDRLEKENDIEEVIRIYSSLLPGNGKIKATLYIYAYSMNDLINVYKTLNKVY

SEQ ID NO: 40761 - protein, 85 aa, unidentified
  REGION 1..85: note = Description of Unknown:cds_NZ_WFIY01000004.1_cds_WP_162309149.1_779 target sequence
LLIEPCILNFKIKYFLKKAGYDEAFIEGKDSNSRISRVTIVTKDKNTLFSNIKLYTGNKLIFCKPLTEEILRICISYNKVHAITV

SEQ ID NO: 40762 - protein, 85 aa, unidentified
  REGION 1..85: note = Description of Unknown:cds_NZ_WFIY01000004.1_cds_WP_162309149.1_779 target sequence
DNANFHLFKRRTTLNLVRLYDKTVEVILPYSSSYIIYKFIIWGYKWIRNILFSSCAKDFNEIWNPLSKVNYLILHGADYEMATYW

SEQ ID NO: 40763 - protein, 84 aa, unidentified
  REGION 1..84: note = Description of Unknown:cds_NZ_WFIY01000004.1_cds_WP_162309149.1_779 target sequence
LYDKTVEVILPYSSSYIIYKFIIWGYKWIRNILFSSCAKDFNEIWNPLSKVNYLILHGADYEMATYWIFKSPQVFLNNVSSNYY

SEQ ID NO: 40764 - protein, 85 aa, unidentified
  REGION 1..85: note = Description of Unknown:cds_NZ_WFIY01000004.1_cds_WP_162309149.1_779 target sequence
GKDSNSRISRVTIVTKDKNTLFSNIKLYTGNKLIFCKPLTEEILRICISYNKVHAITVDNANFHLFKRRTTLNLVRLYDKTVEVI

SEQ ID NO: 40765 - protein, 85 aa, unidentified
  REGION 1..85: note = Description of Unknown:cds_NZ_WFIY01000004.1_cds_WP_155863026.1_912 target sequence
LKKEEVKVVTGNKRKFEEMNQIALQYGIKLSMINLPKFEIQADRLEDVVRHAASVFYSILNEPIILEDSGLFIEALNGFPGPYTK

SEQ ID NO: 40766 - protein, 85 aa, unidentified
  REGION 1..85: note = Description of Unknown:cds_NZ_WFIY01000004.1_cds_WP_155863026.1_912 target sequence
FVKKTLDINGILKLMKGEKNRNAYFKTALAYVNENEIRIFTGEVYGKIAEEARGNKGFGFDPIFIPEGSEKTFAEMEIEEKNKYS

SEQ ID NO: 40767 - protein, 84 aa, unidentified
  REGION 1..84: note = Description of Unknown:cds_NZ_WFIY01000004.1_cds_WP_155863026.1_912 target sequence
EKNRNAYFKTALAYVNENEIRIFTGEVYGKIAEEARGNKGFGFDPIFIPEGSEKTFAEMEIEEKNKYSHRSKAFKKFLDYYIHL

SEQ ID NO: 40768 - protein, 85 aa, unidentified
  REGION 1..85: note = Description of Unknown:cds_NZ_WFIY01000004.1_cds_WP_155863026.1_912 target sequence
IKLSMINLPKFEIQADRLEDVVRHAASVFYSILNEPIILEDSGLFIEALNGFPGPYTKFVKKTLDINGILKLMKGEKNRNAYFKT

SEQ ID NO: 40769 - protein, 85 aa, unidentified
  REGION 1..85: note = Description of Unknown:cds_NZ_WFIY01000004.1_cds_WP_155863051.1_947 target sequence
GDPRKSRKKWEGPGLPWIKELLLHEQELLGKYGLRNKKEIWLARTIVRKFRHMARSLLALPPAERMVREKQLISKLYKMGLLTSQ

SEQ ID NO: 40770 - protein, 85 aa, unidentified
  REGION 1..85: note = Description of Unknown:cds_NZ_WFIY01000004.1_cds_WP_155863051.1_947 target sequence
NATIDDILGLTEEQLLERRLQTIVFKKGLAKTIYQARQLIVHGHIAIGGKRVTSPGYIVPKDEEDLIDYYPTSVFKTRPPTAQVT

SEQ ID NO: 40771 - protein, 84 aa, unidentified
  REGION 1..84: note = Description of Unknown:cds_NZ_WFIY01000004.1_cds_WP_155863051.1_947 target sequence
RRLQTIVFKKGLAKTIYQARQLIVHGHIAIGGKRVTSPGYIVPKDEEDLIDYYPTSVFKTRPPTAQVTQSSQVTQGGEQNVQQA

SEQ ID NO: 40772 - protein, 85 aa, unidentified
  REGION 1..85: note = Description of Unknown:cds_NZ_WFIY01000004.1_cds_WP_155863051.1_947 target sequence
LLGKYGLRNKKEIWLARTIVRKFRHMARSLLALPPAERMVREKQLISKLYKMGLLTSQNATIDDILGLTEEQLLERRLQTIVFKK

SEQ ID NO: 40773 - protein, 85 aa, unidentified
  REGION 1..85: note = Description of Unknown:cds_NZ_WFIY01000004.1_cds_WP_155863068.1_974 target sequence
LISFNSVGEVLEELRKISDFVIIGDTIVDLLLKRKGTESDVDIFPTEISAIAEGEKYRELAEEKNWDFGSTPIDTPRIIVPVEEG

SEQ ID NO: 40774 - protein, 85 aa, unidentified
  REGION 1..85: note = Description of Unknown:cds_NZ_WFIY01000004.1_cds_WP_155863068.1_974 target sequence
QLQIDIYDNIQDFFVPQEILNSAEEMKIGKFTFKVIRLEDYILLKVNAYREEDEDELKGILYYIAEGKLKINKDYLEKHIELFEE

SEQ ID NO: 40775 - protein, 84 aa, unidentified
  REGION 1..84: note = Description of Unknown:cds_NZ_WFIY01000004.1_cds_WP_155863068.1_974 target sequence
ILNSAEEMKIGKFTFKVIRLEDYILLKVNAYREEDEDELKGILYYIAEGKLKINKDYLEKHIELFEENANSIKERLKDIGFRLS

SEQ ID NO: 40776 - protein, 85 aa, unidentified
  REGION 1..85: note = Description of Unknown:cds_NZ_WFIY01000004.1_cds_WP_155863068.1_974 target sequence
VDLLLKRKGTESDVDIFPTEISAIAEGEKYRELAEEKNWDFGSTPIDTPRIIVPVEEGQLQIDIYDNIQDFFVPQEILNSAEEMK

SEQ ID NO: 40777 - protein, 85 aa, unidentified
  REGION 1..85: note = Description of Unknown:cds_NZ_WFIY01000004.1_cds_WP_155863521.1_1466 target sequence
EEKLTKEDIIAMQKLFMNSYERFASVYFFLIAIAAIADYLSISLKNLEISIIFGVTFMFIITVYFTALIFKYSQFIRLRMLFFGH

SEQ ID NO: 40778 - protein, 85 aa, unidentified
  REGION 1..85: note = Description of Unknown:cds_NZ_WFIY01000004.1_cds_WP_155863521.1_1466 target sequence
NKFKNYYITKIVIFIIYMIANSILPNYNLFLFEVTTVPLIPIIILLPSGSPATDKFNNMMYKLSLIYVLFSPVYYFTGISSFLVT

SEQ ID NO: 40779 - protein, 84 aa, unidentified
  REGION 1..84: note = Description of Unknown:cds_NZ_WFIY01000004.1_cds_WP_155863521.1_1466 target sequence
MIANSILPNYNLFLFEVTTVPLIPIIILLPSGSPATDKFNNMMYKLSLIYVLFSPVYYFTGISSFLVTSLLLFAGGIYVVVRQS

SEQ ID NO: 40780 - protein, 85 aa, unidentified
  REGION 1..85: note = Description of Unknown:cds_NZ_WFIY01000004.1_cds_WP_155863521.1_1466 target sequence
FFLIAIAAIADYLSISLKNLEISIIFGVTFMFIITVYFTALIFKYSQFIRLRMLFFGHNKFKNYYITKIVIFIIYMIANSILPNY

SEQ ID NO: 40781 - protein, 85 aa, unidentified
  REGION 1..85: note = Description of Unknown:cds_NZ_WFIY01000004.1_cds_WP_155863957.1_1878 target sequence
KIEDAYKEFIPRLQLILAVIVITIVGYVISIFVDTTPFSLFSNFIVGLTLSYSLVASLAGYLYSPRFIDQIDKIREYFPQSTALG

SEQ ID NO: 40782 - protein, 85 aa, unidentified
  REGION 1..85: note = Description of Unknown:cds_NZ_WFIY01000004.1_cds_WP_155863957.1_1878 target sequence
IILGFFFLLFSYLSTYIGFLTFFLDGLALAFDVLLTPLIFRGISFPKLMKEIKVGIKSDFISFLILYVLALLSLFPLIDIIAIPL

SEQ ID NO: 40783 - protein, 84 aa, unidentified
  REGION 1..84: note = Description of Unknown:cds_NZ_WFIY01000004.1_cds_WP_155863957.1_1878 target sequence
GFLTFFLDGLALAFDVLLTPLIFRGISFPKLMKEIKVGIKSDFISFLILYVLALLSLFPLIDIIAIPLNAILSYLLLKEFYPFI

SEQ ID NO: 40784 - protein, 85 aa, unidentified
  REGION 1..85: note = Description of Unknown:cds_NZ_WFIY01000004.1_cds_WP_155863957.1_1878 target sequence
VISIFVDTTPFSLFSNFIVGLTLSYSLVASLAGYLYSPRFIDQIDKIREYFPQSTALGIILGFFFLLFSYLSTYIGFLTFFLDGL

SEQ ID NO: 40785 - protein, 85 aa, unidentified
  REGION 1..85: note = Description of Unknown:cds_NZ_WFIY01000004.1_cds_WP_155864270.1_2262 target sequence
VRLIISCMDYRLSQEVMNRVKSENDIIIRNAGANIYELKGRLKGINVGEVIFLPHTDCAAMKLVNSAIKDGKEVDKEIEDMLVSQ

SEQ ID NO: 40786 - protein, 85 aa, unidentified
  REGION 1..85: note = Description of Unknown:cds_NZ_WFIY01000004.1_cds_WP_155864270.1_2262 target sequence
FRGKEFSSLQELEKLNAEIGEKMLKEIFPNAKITTELIDVNKIIKIPQKKTRYYLLKPQTRYNEEIIGSYIIQAFSKEDVTADIK

SEQ ID NO: 40787 - protein, 84 aa, unidentified
  REGION 1..84: note = Description of Unknown:cds_NZ_WFIY01000004.1_cds_WP_155864270.1_2262 target sequence
EIGEKMLKEIFPNAKITTELIDVNKIIKIPQKKTRYYLLKPQTRYNEEIIGSYIIQAFSKEDVTADIKIAESLGLKLEKSELDY

SEQ ID NO: 40788 - protein, 85 aa, unidentified
  REGION 1..85: note = Description of Unknown:cds_NZ_WFIY01000004.1_cds_WP_155864270.1_2262 target sequence
IRNAGANIYELKGRLKGINVGEVIFLPHTDCAAMKLVNSAIKDGKEVDKEIEDMLVSQFRGKEFSSLQELEKLNAEIGEKMLKEI

SEQ ID NO: 40789 - protein, 85 aa, unidentified
  REGION 1..85: note = Description of Unknown:cds_NC_035460.1_cds_YP_009408081.1_130 target sequence
ASTNIEMFEEETPQNAASTFTGNTIYASKLKKQKSSRHRQIGICLRVAVVISIVTLMGTSIALGLEVMKLKAVEQTCTTSSTAAL

SEQ ID NO: 40790 - protein, 85 aa, unidentified
  REGION 1..85: note = Description of Unknown:cds_NC_035460.1_cds_YP_009408081.1_130 target sequence
IKKDDGTYETHCNGLVYDGDCYVKHADKKSFNDANNECTKTKSQLPQTSVSSVTWLRPHLVNTWNEEGTAFTNDYDKFIDDSESE

SEQ ID NO: 40791 - protein, 84 aa, unidentified
  REGION 1..84: note = Description of Unknown:cds_NC_035460.1_cds_YP_009408081.1_130 target sequence
DGDCYVKHADKKSFNDANNECTKTKSQLPQTSVSSVTWLRPHLVNTWNEEGTAFTNDYDKFIDDSESEREYFCVTHLYTQSNVD

SEQ ID NO: 40792 - protein, 85 aa, unidentified
  REGION 1..85: note = Description of Unknown:cds_NC_035460.1_cds_YP_009408081.1_130 target sequence
SKLKKQKSSRHRQIGICLRVAVVISIVTLMGTSIALGLEVMKLKAVEQTCTTSSTAALIKKDDGTYETHCNGLVYDGDCYVKHAD

SEQ ID NO: 40793 - protein, 85 aa, unidentified
  REGION 1..85: note = Description of Unknown:cds_NC_007409.1_cds_YP_319863.1_32 target sequence
LSTTFDKDQENEQQQQDAQAIWKKILSPGARITKDDVDFAIDNLESAPDVPYEFMYATFSPNAKIYQPTAIAVSGVGGIIGALLA

SEQ ID NO: 40794 - protein, 85 aa, unidentified
  REGION 1..85: note = Description of Unknown:cds_NC_007409.1_cds_YP_319863.1_32 target sequence
LKRALQYGGPKYYVTTEEVIKATDQKSPLYLANYALNRLLKAYPAQVVVIKPDDFDKIKTLLSSGGVYISGLPYETLIPISQLSG

SEQ ID NO: 40795 - protein, 84 aa, unidentified
  REGION 1..84: note = Description of Unknown:cds_NC_007409.1_cds_YP_319863.1_32 target sequence
VIKATDQKSPLYLANYALNRLLKAYPAQVVVIKPDDFDKIKTLLSSGGVYISGLPYETLIPISQLSGFGRIWHYSPIQKKFFVF

SEQ ID NO: 40796 - protein, 85 aa, unidentified
  REGION 1..85: note = Description of Unknown:cds_NC_007409.1_cds_YP_319863.1_32 target sequence
PGARITKDDVDFAIDNLESAPDVPYEFMYATFSPNAKIYQPTAIAVSGVGGIIGALLALKRALQYGGPKYYVTTEEVIKATDQKS

SEQ ID NO: 40797 - protein, 85 aa, unidentified
  REGION 1..85: note = Description of Unknown:cds_NC_024711.1_cds_YP_009052504.1_23 target sequence
IIKGYEEKLDDRDIRYINYVIDKSTMADAIESYIKDLDCTIIYPDGSRPRQTINYGYRITFSSIEYILDKLYLVLEHHPEKAQSY

SEQ ID NO: 40798 - protein, 85 aa, unidentified
  REGION 1..85: note = Description of Unknown:cds_NC_024711.1_cds_YP_009052504.1_23 target sequence
IDYRNSIIKRIIDIHEKNLDFERRNPVRYYSKEPRKRTRSSNRVNQSKDVFTGQPINVSTGIAKAIKPKKETIAQRKAKLLGGKA

SEQ ID NO: 40799 - protein, 84 aa, unidentified
  REGION 1..84: note = Description of Unknown:cds_NC_024711.1_cds_YP_009052504.1_23 target sequence
KNLDFERRNPVRYYSKEPRKRTRSSNRVNQSKDVFTGQPINVSTGIAKAIKPKKETIAQRKAKLLGGKAVSFAFNGLKISEHNE

SEQ ID NO: 40800 - protein, 85 aa, unidentified
  REGION 1..85: note = Description of Unknown:cds_NC_024711.1_cds_YP_009052504.1_23 target sequence
DAIESYIKDLDCTIIYPDGSRPRQTINYGYRITFSSIEYILDKLYLVLEHHPEKAQSYIDYRNSIIKRIIDIHEKNLDFERRNPV

SEQ ID NO: 40801 - protein, 85 aa, unidentified
  REGION 1..85: note = Description of Unknown:cds_NZ_WFIY01000004.1_cds_WP_155862341.1_68 target sequence
ERLISIIFHPSISSFLGFLIIFLARCRSLLAFADIIFFFSILPFLITLVMWKLGKISDLFVSRREERAKVIIIVLVGYILGSAFL

SEQ ID NO: 40802 - protein, 85 aa, unidentified
  REGION 1..85: note = Description of Unknown:cds_NZ_WFIY01000004.1_cds_WP_155862341.1_68 target sequence
YYFNSSPIFFYLSIAYIVNTLVILSISLKYKISIHVATITAISTALTMILGIKFIFFYLFSIIIGIARVKIKAHTVDQVLSAFII

SEQ ID NO: 40803 - protein, 84 aa, unidentified
  REGION 1..84: note = Description of Unknown:cds_NZ_WFIY01000004.1_cds_WP_155862341.1_68 target sequence
IVNTLVILSISLKYKISIHVATITAISTALTMILGIKFIFFYLFSIIIGIARVKIKAHTVDQVLSAFIISIIVTFIQLKIYLGE

SEQ ID NO: 40804 - protein, 85 aa, unidentified
  REGION 1..85: note = Description of Unknown:cds_NZ_WFIY01000004.1_cds_WP_155862341.1_68 target sequence
SLLAFADIIFFFSILPFLITLVMWKLGKISDLFVSRREERAKVIIIVLVGYILGSAFLYYFNSSPIFFYLSIAYIVNTLVILSIS

SEQ ID NO: 40805 - protein, 85 aa, unidentified
  REGION 1..85: note = Description of Unknown:cds_NZ_WFIY01000004.1_cds_WP_155862361.1_92 target sequence
AWFNKDEVKKFIRKDNSVLVVWDVQEALVNSIFNKEEFLQKLKELISVARQYNVPIVYTKITPLPERFQPPYMRRSFNPGDIVKE

SEQ ID NO: 40806 - protein, 85 aa, unidentified
  REGION 1..85: note = Description of Unknown:cds_NZ_WFIY01000004.1_cds_WP_155862361.1_92 target sequence
VYPLEGDVVLNKNTTSIFVGTNFELMLRNAGIQTIVFTGIATDIGVETSARHAQALGYLPVIAREAVSSSDKDAHERSLINMSKL

SEQ ID NO: 40807 - protein, 84 aa, unidentified
  REGION 1..84: note = Description of Unknown:cds_NZ_WFIY01000004.1_cds_WP_155862361.1_92 target sequence
IFVGTNFELMLRNAGIQTIVFTGIATDIGVETSARHAQALGYLPVIAREAVSSSDKDAHERSLINMSKLMLVLDNKEIIERWSS

SEQ ID NO: 40808 - protein, 85 aa, unidentified
  REGION 1..85: note = Description of Unknown:cds_NZ_WFIY01000004.1_cds_WP_155862361.1_92 target sequence
LVNSIFNKEEFLQKLKELISVARQYNVPIVYTKITPLPERFQPPYMRRSFNPGDIVKEVYPLEGDVVLNKNTTSIFVGTNFELML

SEQ ID NO: 40809 - protein, 85 aa, unidentified
  REGION 1..85: note = Description of Unknown:cds_NZ_WFIY01000004.1_cds_WP_155862785.1_600 target sequence
TEEKRANPAPLGLSGFALTTLVLSTYNAGLLTSGSGVVLGLAAFYGGLAQLLAGILEWKGGNTFGYVAFFTYGAFWEWYFLTALG

SEQ ID NO: 40810 - protein, 85 aa, unidentified
  REGION 1..85: note = Description of Unknown:cds_NZ_WFIY01000004.1_cds_WP_155862785.1_600 target sequence
IFGNITAQGVGLVLIAFGIFTLIMWFATFKTNLGLFTTFLLLWITFFLLGIGSLTCNTLLVHAGGYTGILTAIAAWYTGLVQVVA

SEQ ID NO: 40811 - protein, 84 aa, unidentified
  REGION 1..84: note = Description of Unknown:cds_NZ_WFIY01000004.1_cds_WP_155862785.1_600 target sequence
FGIFTLIMWFATFKTNLGLFTTFLLLWITFFLLGIGSLTCNTLLVHAGGYTGILTAIAAWYTGLVQVVAESLNKKAPLGRAPLS

SEQ ID NO: 40812 - protein, 85 aa, unidentified
  REGION 1..85: note = Description of Unknown:cds_NZ_WFIY01000004.1_cds_WP_155862785.1_600 target sequence
AGLLTSGSGVVLGLAAFYGGLAQLLAGILEWKGGNTFGYVAFFTYGAFWEWYFLTALGIFGNITAQGVGLVLIAFGIFTLIMWFA

SEQ ID NO: 40813 - protein, 85 aa, unidentified
  REGION 1..85: note = Description of Unknown:cds_NZ_WFIY01000004.1_cds_WP_155862814.1_643 target sequence
QILRDKLTKKSLIFPVLSLIVAMNPVTELLEPRYEALYMAMHYLLYIGGFVLGYIGFRGSKIYLIPGIIIPVFWHIPYFFNLGGA

SEQ ID NO: 40814 - protein, 85 aa, unidentified
  REGION 1..85: note = Description of Unknown:cds_NZ_WFIY01000004.1_cds_WP_155862814.1_643 target sequence
YLCLRIVEDLSLYLGGLVMGSTIHGLNNAIKAILFVLWMMGDSVLSVILIVGWPPYSNQVYPFSPFSISEEFWTGLVMFGIMTVI

SEQ ID NO: 40815 - protein, 84 aa, unidentified
  REGION 1..84: note = Description of Unknown:cds_NZ_WFIY01000004.1_cds_WP_155862814.1_643 target sequence
LVMGSTIHGLNNAIKAILFVLWMMGDSVLSVILIVGWPPYSNQVYPFSPFSISEEFWTGLVMFGIMTVIFIYIILGFIRTVFKI

SEQ ID NO: 40816 - protein, 85 aa, unidentified
  REGION 1..85: note = Description of Unknown:cds_NZ_WFIY01000004.1_cds_WP_155862814.1_643 target sequence
ELLEPRYEALYMAMHYLLYIGGFVLGYIGFRGSKIYLIPGIIIPVFWHIPYFFNLGGAYLCLRIVEDLSLYLGGLVMGSTIHGLN

SEQ ID NO: 40817 - protein, 85 aa, unidentified
  REGION 1..85: note = Description of Unknown:cds_NZ_WFIY01000004.1_cds_WP_155862840.1_673 target sequence
KLFGHNVDSLLTPEVNYIITKKVFVPFLAEEFPEIVSLNSNFNVIRELIVIKDHLLRGNKIQIGYKFTISSKTDGRLSSLKECKK

SEQ ID NO: 40818 - protein, 85 aa, unidentified
  REGION 1..85: note = Description of Unknown:cds_NZ_WFIY01000004.1_cds_WP_155862840.1_673 target sequence
IILGINAKLIKKLGALTTDLIFFGFKKELEKILILHDIPIIAKNKEELYNEIFNYLSSWGINVSSIPAEITNVPNKVNTDSKILD

SEQ ID NO: 40819 - protein, 84 aa, unidentified
  REGION 1..84: note = Description of Unknown:cds_NZ_WFIY01000004.1_cds_WP_155862840.1_673 target sequence
TTDLIFFGFKKELEKILILHDIPIIAKNKEELYNEIFNYLSSWGINVSSIPAEITNVPNKVNTDSKILDIDYALFSSQLSSNFT

SEQ ID NO: 40820 - protein, 85 aa, unidentified
  REGION 1..85: note = Description of Unknown:cds_NZ_WFIY01000004.1_cds_WP_155862840.1_673 target sequence
LAEEFPEIVSLNSNFNVIRELIVIKDHLLRGNKIQIGYKFTISSKTDGRLSSLKECKKIILGINAKLIKKLGALTTDLIFFGFKK

SEQ ID NO: 40821 - protein, 85 aa, unidentified
  REGION 1..85: note = Description of Unknown:cds_NZ_WFIY01000004.1_cds_WP_155864149.1_2103 target sequence
IRYSKEFEKKDLILPIALLVAFLNPFIQGLEFTNPIVYMLDHYAIYGAGVLLGYKLLRTNFYLFLLGVIPAGFWHIPLFFALGAS

SEQ ID NO: 40822 - protein, 85 aa, unidentified
  REGION 1..85: note = Description of Unknown:cds_NZ_WFIY01000004.1_cds_WP_155864149.1_2103 target sequence
FIQYRTIEELTLFLGGLIAGGYIPQMKLSGKVGALAVYMLADSILSIFFILEYKQYTHECFPFLDYTPSQLPFVGISMFAVMNVI

SEQ ID NO: 40823 - protein, 84 aa, unidentified
  REGION 1..84: note = Description of Unknown:cds_NZ_WFIY01000004.1_cds_WP_155864149.1_2103 target sequence
LIAGGYIPQMKLSGKVGALAVYMLADSILSIFFILEYKQYTHECFPFLDYTPSQLPFVGISMFAVMNVILVYAIIKILRNASIF

SEQ ID NO: 40824 - protein, 85 aa, unidentified
  REGION 1..85: note = Description of Unknown:cds_NZ_WFIY01000004.1_cds_WP_155864149.1_2103 target sequence
QGLEFTNPIVYMLDHYAIYGAGVLLGYKLLRTNFYLFLLGVIPAGFWHIPLFFALGASFIQYRTIEELTLFLGGLIAGGYIPQMK

SEQ ID NO: 40825 - protein, 85 aa, unidentified
  REGION 1..85: note = Description of Unknown:cds_NZ_WFIY01000004.1_cds_WP_155864206.1_2172 target sequence
SNNFVQSMICQPVGGKVIQLNINKPLDMKALAQDLKMLFRSEGMTVYATYSPNILILQLHARGLKGHYYTTKICQDNNKVVIETG

SEQ ID NO: 40826 - protein, 85 aa, unidentified
  REGION 1..85: note = Description of Unknown:cds_NZ_WFIY01000004.1_cds_WP_155864206.1_2172 target sequence
ITSARVQLEWAGVEGGIAGASDLLLHNKFLALLGSAFAGVDVASVLGSYEQEQEIINQIVQVITSHQQAVSQQTPRYCPNCGYPV

SEQ ID NO: 40827 - protein, 84 aa, unidentified
  REGION 1..84: note = Description of Unknown:cds_NZ_WFIY01000004.1_cds_WP_155864206.1_2172 target sequence
IAGASDLLLHNKFLALLGSAFAGVDVASVLGSYEQEQEIINQIVQVITSHQQAVSQQTPRYCPNCGYPVAPQYKFCPNCGYRLR

SEQ ID NO: 40828 - protein, 85 aa, unidentified
  REGION 1..85: note = Description of Unknown:cds_NZ_WFIY01000004.1_cds_WP_155864206.1_2172 target sequence
MKALAQDLKMLFRSEGMTVYATYSPNILILQLHARGLKGHYYTTKICQDNNKVVIETGITSARVQLEWAGVEGGIAGASDLLLHN

SEQ ID NO: 40829 - protein, 85 aa, unidentified
  REGION 1..85: note = Description of Unknown:cds_NZ_WFIY01000004.1_cds_WP_155864219.1_2187 target sequence
LVRVSLEIRFHGRGGQGVVTSAELLAVAAGKQGLWSSAFPIYGAERRGAEIEAYCRISNQPIRLTSPIENPDIVVIIDPTLLNIS

SEQ ID NO: 40830 - protein, 85 aa, unidentified
  REGION 1..85: note = Description of Unknown:cds_NZ_WFIY01000004.1_cds_WP_155864219.1_2187 target sequence
NPLRGLKKDGKVLINAKSVNIPFTTYVIDAYKIAREIGLIKSGWPMVNVIILGALVRIINLSLDSLNKAIDEEFEGKVADLNKRG

SEQ ID NO: 40831 - protein, 84 aa, unidentified
  REGION 1..84: note = Description of Unknown:cds_NZ_WFIY01000004.1_cds_WP_155864219.1_2187 target sequence
SVNIPFTTYVIDAYKIAREIGLIKSGWPMVNVIILGALVRIINLSLDSLNKAIDEEFEGKVADLNKRGAEIAYKIISEAYEIAV

SEQ ID NO: 40832 - protein, 85 aa, unidentified
  REGION 1..85: note = Description of Unknown:cds_NZ_WFIY01000004.1_cds_WP_155864219.1_2187 target sequence
AAGKQGLWSSAFPIYGAERRGAEIEAYCRISNQPIRLTSPIENPDIVVIIDPTLLNISNPLRGLKKDGKVLINAKSVNIPFTTYV

SEQ ID NO: 40833 - protein, 85 aa, unidentified
  REGION 1..85: note = Description of Unknown:cds_NZ_WFIY01000004.1_cds_WP_155864285.1_2278 target sequence
LLGELLSRIGELKGSETDRFLKFLAILNTLIEEKHLGRIIIVGGFAAEIYSGRSYRTGDVDIIIEGEAENLVRQVLKKISDFGLR

SEQ ID NO: 40834 - protein, 85 aa, unidentified
  REGION 1..85: note = Description of Unknown:cds_NZ_WFIY01000004.1_cds_WP_155864285.1_2278 target sequence
IYLPKIREISEKGIDIVNNVYNKHKPPLKLQVDSYYVYIIPPEEVVLTYLEAWKFWNSTEDRNKAVLVYCAQRDVMDINYIISES

SEQ ID NO: 40835 - protein, 84 aa, unidentified
  REGION 1..84: note = Description of Unknown:cds_NZ_WFIY01000004.1_cds_WP_155864285.1_2278 target sequence
NNVYNKHKPPLKLQVDSYYVYIIPPEEVVLTYLEAWKFWNSTEDRNKAVLVYCAQRDVMDINYIISESEKRGVNDFFEKIKEYC

SEQ ID NO: 40836 - protein, 85 aa, unidentified
  REGION 1..85: note = Description of Unknown:cds_NZ_WFIY01000004.1_cds_WP_155864285.1_2278 target sequence
NTLIEEKHLGRIIIVGGFAAEIYSGRSYRTGDVDIIIEGEAENLVRQVLKKISDFGLRIYLPKIREISEKGIDIVNNVYNKHKPP

SEQ ID NO: 40837 - protein, 85 aa, unidentified
  REGION 1..85: note = Description of Unknown:cds_NC_029316.1_cds_YP_009230340.1_87 target sequence
ENKGDLSQTPKNQIQFFWDLLNFNKDKLKDLEPQRLFDSLYNHLTRLAEILKGDSYRDSYKRKIFVYQMLKSVMSSLCYIAPLPI

SEQ ID NO: 40838 - protein, 85 aa, unidentified
  REGION 1..85: note = Description of Unknown:cds_NC_029316.1_cds_YP_009230340.1_87 target sequence
IIYSSNTKFYEFGVIRRNEIPVAVVLEYDVEDNNAKPSSIYEINECNEPVDPDNVGNVRMGTGFDYADVLNLEIPGVYKKIRIEF

SEQ ID NO: 40839 - protein, 84 aa, unidentified
  REGION 1..84: note = Description of Unknown:cds_NC_029316.1_cds_YP_009230340.1_87 target sequence
RNEIPVAVVLEYDVEDNNAKPSSIYEINECNEPVDPDNVGNVRMGTGFDYADVLNLEIPGVYKKIRIEFGDDDKIEIKKIEEEE

SEQ ID NO: 40840 - protein, 85 aa, unidentified
  REGION 1..85: note = Description of Unknown:cds_NC_029316.1_cds_YP_009230340.1_87 target sequence
LKDLEPQRLFDSLYNHLTRLAEILKGDSYRDSYKRKIFVYQMLKSVMSSLCYIAPLPIIIYSSNTKFYEFGVIRRNEIPVAVVLE

SEQ ID NO: 40841 - protein, 85 aa, unidentified
  REGION 1..85: note = Description of Unknown:hvTR_Q89532 target sequence
SILISPDNNTGWGLCSAGMYGGAKRRSSQHPVRVRGHYRAPWGAYTRGVISRRTTVDDVIDSVVADAQRYTRPVATSTVDSVIDS

SEQ ID NO: 40842 - protein, 85 aa, unidentified
  REGION 1..85: note = Description of Unknown:hvTR_Q89532 target sequence
VVANARRYAQRKRRLQRRRRRPTAAMTAARAVLRRAQRIGRRAMRRAAASASAGRARRQAARQAAAAIASMAQPRRGNIYWVRDA

SEQ ID NO: 40843 - protein, 84 aa, unidentified
  REGION 1..84: note = Description of Unknown:hvTR_Q89532 target sequence
QRRRRRPTAAMTAARAVLRRAQRIGRRAMRRAAASASAGRARRQAARQAAAAIASMAQPRRGNIYWVRDASGVRVPVRSRPPRS

SEQ ID NO: 40844 - protein, 85 aa, unidentified
  REGION 1..85: note = Description of Unknown:hvTR_Q89532 target sequence
SQHPVRVRGHYRAPWGAYTRGVISRRTTVDDVIDSVVADAQRYTRPVATSTVDSVIDSVVANARRYAQRKRRLQRRRRRPTAAMT

SEQ ID NO: 40845 - protein, 85 aa, unidentified
  REGION 1..85: note = Description of Unknown:cds_NZ_WFIY01000004.1_cds_WP_155862406.1_143 target sequence
QTCLMKRDEEESLLILVSEKVIPIYAKGYFTIARNGKGLFISTFYYYDKEGYYASLDKEKLEEEKEKLKENMQYYLNQETLRINR

SEQ ID NO: 40846 - protein, 85 aa, unidentified
  REGION 1..85: note = Description of Unknown:cds_NZ_WFIY01000004.1_cds_WP_155862406.1_143 target sequence
RRVNEKVSKVEINLLSVNYPMIDFYITFKARLKLGYNLYEDIYENEVTEYPFEAVYVFPGKILSARIRGEVSIKDNIAIVKVKKG

SEQ ID NO: 40847 - protein, 84 aa, unidentified
  REGION 1..84: note = Description of Unknown:cds_NZ_WFIY01000004.1_cds_WP_155862406.1_143 target sequence
SVNYPMIDFYITFKARLKLGYNLYEDIYENEVTEYPFEAVYVFPGKILSARIRGEVSIKDNIAIVKVKKGMKTGKREIFAFRVI

SEQ ID NO: 40848 - protein, 85 aa, unidentified
  REGION 1..85: note = Description of Unknown:cds_NZ_WFIY01000004.1_cds_WP_155862406.1_143 target sequence
GYFTIARNGKGLFISTFYYYDKEGYYASLDKEKLEEEKEKLKENMQYYLNQETLRINRRRVNEKVSKVEINLLSVNYPMIDFYIT

SEQ ID NO: 40849 - protein, 85 aa, unidentified
  REGION 1..85: note = Description of Unknown:cds_NZ_WFIY01000004.1_cds_WP_155862418.1_159 target sequence
CIGLLLDIIFFIIDIIIPIWNSYNSGKISAYRKGLGKLLYALGGFLPMSYVLSLIIAIVLGIFGYISVSTTVFILSFSGLVFGLE

SEQ ID NO: 40850 - protein, 85 aa, unidentified
  REGION 1..85: note = Description of Unknown:cds_NZ_WFIY01000004.1_cds_WP_155862418.1_159 target sequence
IIIWGVIATYLSAVSTVRGRDWKAGLITGYNAFATIFDAWAYISSFFSNLRDARKAIDSSDFSVIDVIIIFAVALGVGFIITYAA

SEQ ID NO: 40851 - protein, 84 aa, unidentified
  REGION 1..84: note = Description of Unknown:cds_NZ_WFIY01000004.1_cds_WP_155862418.1_159 target sequence
TVRGRDWKAGLITGYNAFATIFDAWAYISSFFSNLRDARKAIDSSDFSVIDVIIIFAVALGVGFIITYAAYKEGLKSARTRYWY

SEQ ID NO: 40852 - protein, 85 aa, unidentified
  REGION 1..85: note = Description of Unknown:cds_NZ_WFIY01000004.1_cds_WP_155862418.1_159 target sequence
ISAYRKGLGKLLYALGGFLPMSYVLSLIIAIVLGIFGYISVSTTVFILSFSGLVFGLEIIIWGVIATYLSAVSTVRGRDWKAGLI

SEQ ID NO: 40853 - protein, 85 aa, unidentified
  REGION 1..85: note = Description of Unknown:cds_NZ_WFIY01000004.1_cds_WP_155863886.1_1792 target sequence
KIGAVILAAGESKRFGKNKLLEKINGKSIIENVLENVDIERVIVVGKYAEELLPYLKNEIVIYNPKWKEGISSSIKLGLRFFQNY

SEQ ID NO: 40854 - protein, 85 aa, unidentified
  REGION 1..85: note = Description of Unknown:cds_NZ_WFIY01000004.1_cds_WP_155863886.1_1792 target sequence
DGVLIVLGDMPFVKREDIHKIINTFNLDCNAVIPTYKGNWGNPVLLNRKIFDKVMEITGDEGAKKILKTTENLCFVECDYGVIVD

SEQ ID NO: 40855 - protein, 84 aa, unidentified
  REGION 1..84: note = Description of Unknown:cds_NZ_WFIY01000004.1_cds_WP_155863886.1_1792 target sequence
EDIHKIINTFNLDCNAVIPTYKGNWGNPVLLNRKIFDKVMEITGDEGAKKILKTTENLCFVECDYGVIVDIDTVNDLLTFEKLP

SEQ ID NO: 40856 - protein, 85 aa, unidentified
  REGION 1..85: note = Description of Unknown:cds_NZ_WFIY01000004.1_cds_WP_155863886.1_1792 target sequence
SIIENVLENVDIERVIVVGKYAEELLPYLKNEIVIYNPKWKEGISSSIKLGLRFFQNYDGVLIVLGDMPFVKREDIHKIINTFNL

SEQ ID NO: 40857 - protein, 85 aa, unidentified
  REGION 1..85: note = Description of Unknown:cds_NC_035460.1_cds_YP_009408024.1_73 target sequence
NPHNVKYLAKILCLKTEILRDPYAIISRDILSHYNTNIKYGDLISIVTVSHKIDSMITNYQIFNETAVTYTPIENDYGEPIIITT

SEQ ID NO: 40858 - protein, 85 aa, unidentified
  REGION 1..85: note = Description of Unknown:cds_NC_035460.1_cds_YP_009408024.1_73 target sequence
YLQSGHNKFPINFLYIDVVISDMFPKFVRLKPDEASAVSSMLQIGSSKESLKLPKMLETELVAKILYRPNMPLKIVRFYRNNMVT

SEQ ID NO: 40859 - protein, 84 aa, unidentified
  REGION 1..84: note = Description of Unknown:cds_NC_035460.1_cds_YP_009408024.1_73 target sequence
IDVVISDMFPKFVRLKPDEASAVSSMLQIGSSKESLKLPKMLETELVAKILYRPNMPLKIVRFYRNNMVTGIEIADRAIVAVYE

SEQ ID NO: 40860 - protein, 85 aa, unidentified
  REGION 1..85: note = Description of Unknown:cds_NC_035460.1_cds_YP_009408024.1_73 target sequence
RDILSHYNTNIKYGDLISIVTVSHKIDSMITNYQIFNETAVTYTPIENDYGEPIIITTYLQSGHNKFPINFLYIDVVISDMFPKF

SEQ ID NO: 40861 - protein, 85 aa, unidentified
  REGION 1..85: note = Description of Unknown:cds_NC_030656.1_cds_YP_009268787.1_72 target sequence
NKHNIKYLAKILCLKAKVAHDPFATISKDVLSMYDITTNYGDIVSIVTVVHKIDTKVTVFQVFNEASVNYSPINNDYGVPIIITS

SEQ ID NO: 40862 - protein, 85 aa, unidentified
  REGION 1..85: note = Description of Unknown:cds_NC_030656.1_cds_YP_009268787.1_72 target sequence
YLQPEHNKFPISFLYIDAVASDLFPTFKRLTQEEYTTVTSVLLTGNKKESLKLPRMLDTELSAKILYHKEYPAKIIRFFRSNLVT

SEQ ID NO: 40863 - protein, 84 aa, unidentified
  REGION 1..84: note = Description of Unknown:cds_NC_030656.1_cds_YP_009268787.1_72 target sequence
IDAVASDLFPTFKRLTQEEYTTVTSVLLTGNKKESLKLPRMLDTELSAKILYHKEYPAKIIRFFRSNLVTGLEIADRSVANVIE

SEQ ID NO: 40864 - protein, 85 aa, unidentified
  REGION 1..85: note = Description of Unknown:cds_NC_030656.1_cds_YP_009268787.1_72 target sequence
KDVLSMYDITTNYGDIVSIVTVVHKIDTKVTVFQVFNEASVNYSPINNDYGVPIIITSYLQPEHNKFPISFLYIDAVASDLFPTF

SEQ ID NO: 40865 - protein, 85 aa, unidentified
  REGION 1..85: note = Description of Unknown:cds_NC_024711.1_cds_YP_009052496.1_15 target sequence
ASKTVDEYPDCERCPNRIFNTGKYIQGGRGSIHGDIVFLFPRGDRNYCEDYQLFTDIGNLYDEYSGRNNTEDVYMTYSIKCACSN

SEQ ID NO: 40866 - protein, 85 aa, unidentified
  REGION 1..85: note = Description of Unknown:cds_NC_024711.1_cds_YP_009052496.1_15 target sequence
NYNTYLTAIDKCRNILWKELARINYKYLFVFGDAYRSISDNPIPRFMATGGKYVFSNYSPLIKFKDDNLYHIFKQRFADDINWVN

SEQ ID NO: 40867 - protein, 84 aa, unidentified
  REGION 1..84: note = Description of Unknown:cds_NC_024711.1_cds_YP_009052496.1_15 target sequence
ILWKELARINYKYLFVFGDAYRSISDNPIPRFMATGGKYVFSNYSPLIKFKDDNLYHIFKQRFADDINWVNQNRNNYGLNYIND

SEQ ID NO: 40868 - protein, 85 aa, unidentified
  REGION 1..85: note = Description of Unknown:cds_NC_024711.1_cds_YP_009052496.1_15 target sequence
GRGSIHGDIVFLFPRGDRNYCEDYQLFTDIGNLYDEYSGRNNTEDVYMTYSIKCACSNNYNTYLTAIDKCRNILWKELARINYKY

SEQ ID NO: 40869 - protein, 85 aa, unidentified
  REGION 1..85: note = Description of Unknown:cds_NC_024711.1_cds_YP_009052521.1_43 target sequence
ATYRFNTKLIKKFVDAQKERIAEVASNIAPTIYDINKTVEVMDTMQVISITNTTYNINKLGIKGRDYVGVAMEILDKERYFNEAT

SEQ ID NO: 40870 - protein, 85 aa, unidentified
  REGION 1..85: note = Description of Unknown:cds_NC_024711.1_cds_YP_009052521.1_43 target sequence
LHLFNYICRNLAYMSNVIEFTESAITEYYGISTHTFYKALQTLYTANVIKPTTRKSVYIVNHNYIFRGNYTEFIQLYKEMYSDKD

SEQ ID NO: 40871 - protein, 84 aa, unidentified
  REGION 1..84: note = Description of Unknown:cds_NC_024711.1_cds_YP_009052521.1_43 target sequence
SNVIEFTESAITEYYGISTHTFYKALQTLYTANVIKPTTRKSVYIVNHNYIFRGNYTEFIQLYKEMYSDKDVIVNEDGKIVLDY

SEQ ID NO: 40872 - protein, 85 aa, unidentified
  REGION 1..85: note = Description of Unknown:cds_NC_024711.1_cds_YP_009052521.1_43 target sequence
IAPTIYDINKTVEVMDTMQVISITNTTYNINKLGIKGRDYVGVAMEILDKERYFNEATLHLFNYICRNLAYMSNVIEFTESAITE

SEQ ID NO: 40873 - protein, 85 aa, unidentified
  REGION 1..85: note = Description of Unknown:cds_NZ_WFIY01000004.1_cds_WP_155862378.1_114 target sequence
LMLESYTLIVNLLYVSLLLETSLLFYFVSRKLENLPYLWKDVRSLYLLRIFSEVLDLLSSTDLLDDGIIGANFNIKSEALQKFLE

SEQ ID NO: 40874 - protein, 85 aa, unidentified
  REGION 1..85: note = Description of Unknown:cds_NZ_WFIY01000004.1_cds_WP_155862378.1_114 target sequence
KEVKGVGSKIKIINTYISSMEKIDAYISGISSNIKEIFYLILASIISFALYFIPGFSLDGLFLGFSLGLNIISMYYTIYSYLVYR

SEQ ID NO: 40875 - protein, 84 aa, unidentified
  REGION 1..84: note = Description of Unknown:cds_NZ_WFIY01000004.1_cds_WP_155862378.1_114 target sequence
YISSMEKIDAYISGISSNIKEIFYLILASIISFALYFIPGFSLDGLFLGFSLGLNIISMYYTIYSYLVYRDIMKKIMEIRNSKS

SEQ ID NO: 40876 - protein, 85 aa, unidentified
  REGION 1..85: note = Description of Unknown:cds_NZ_WFIY01000004.1_cds_WP_155862378.1_114 target sequence
VSRKLENLPYLWKDVRSLYLLRIFSEVLDLLSSTDLLDDGIIGANFNIKSEALQKFLEKEVKGVGSKIKIINTYISSMEKIDAYI

SEQ ID NO: 40877 - protein, 85 aa, unidentified
  REGION 1..85: note = Description of Unknown:cds_NZ_WFIY01000004.1_cds_WP_155862994.1_871 target sequence
REFYIVNDVIEGIPLSLVSHPGLFSKKKIDLGTRTFLENLIIPQQGTVVDLGCGYGVIGIFIALKNENLKVYMLDINPLAIATAK

SEQ ID NO: 40878 - protein, 85 aa, unidentified
  REGION 1..85: note = Description of Unknown:cds_NZ_WFIY01000004.1_cds_WP_155862994.1_871 target sequence
MNVERYNLQNRVIVMKSDVLSTLQEKVDAIYSNPPLSKGVDFLQKFAEQSAEKLKKGGFIQMVVYKGENNVIKIFSNYFSDIKVI

SEQ ID NO: 40879 - protein, 84 aa, unidentified
  REGION 1..84: note = Description of Unknown:cds_NZ_WFIY01000004.1_cds_WP_155862994.1_871 target sequence
MKSDVLSTLQEKVDAIYSNPPLSKGVDFLQKFAEQSAEKLKKGGFIQMVVYKGENNVIKIFSNYFSDIKVIKKSKGYSIIVVNN

SEQ ID NO: 40880 - protein, 85 aa, unidentified
  REGION 1..85: note = Description of Unknown:cds_NZ_WFIY01000004.1_cds_WP_155862994.1_871 target sequence
KIDLGTRTFLENLIIPQQGTVVDLGCGYGVIGIFIALKNENLKVYMLDINPLAIATAKMNVERYNLQNRVIVMKSDVLSTLQEKV

SEQ ID NO: 40881 - protein, 85 aa, unidentified
  REGION 1..85: note = Description of Unknown:cds_NZ_WFIY01000004.1_cds_WP_155863150.1_1078 target sequence
VGIKKVAIKVNNPRIFRQLVQELRKSDLIPTVDSGDLTISDFDKNADVFIQGEDDIKKAITYLQCLKLGKRKFDELLIGIDTNSP

SEQ ID NO: 40882 - protein, 85 aa, unidentified
  REGION 1..85: note = Description of Unknown:cds_NZ_WFIY01000004.1_cds_WP_155863150.1_1078 target sequence
KLTVVILGDGIIIDILEAWIDEIEDIIEEVISKYPYKRIYIGVGTGNKYGELVYKLLSIRFPFVKKVNESRTSLRNPYVNIKDKD

SEQ ID NO: 40883 - protein, 84 aa, unidentified
  REGION 1..84: note = Description of Unknown:cds_NZ_WFIY01000004.1_cds_WP_155863150.1_1078 target sequence
LEAWIDEIEDIIEEVISKYPYKRIYIGVGTGNKYGELVYKLLSIRFPFVKKVNESRTSLRNPYVNIKDKDVRAAYMIALRSTKC

SEQ ID NO: 40884 - protein, 85 aa, unidentified
  REGION 1..85: note = Description of Unknown:cds_NZ_WFIY01000004.1_cds_WP_155863150.1_1078 target sequence
LIPTVDSGDLTISDFDKNADVFIQGEDDIKKAITYLQCLKLGKRKFDELLIGIDTNSPKLTVVILGDGIIIDILEAWIDEIEDII

SEQ ID NO: 40885 - protein, 85 aa, unidentified
  REGION 1..85: note = Description of Unknown:cds_NZ_WFIY01000004.1_cds_WP_155863661.1_1539 target sequence
SGKQSEEFKRTEKMTRMEYLFPVRFAVGWMFLDGGLRKAVLKPAKLDPNSASFVGGKLVNFLPHAGPFKGFLLMTLENRSLDVTF

SEQ ID NO: 40886 - protein, 85 aa, unidentified
  REGION 1..85: note = Description of Unknown:cds_NZ_WFIY01000004.1_cds_WP_155863661.1_1539 target sequence
LTVFSYIEIIAGLFIIIGLLTRLAALGALAMSVGFAPAYWLGSTCEDEWQIGALLTAGSITLMLTAAGRVWGLDYFLYKKLGDRP

SEQ ID NO: 40887 - protein, 84 aa, unidentified
  REGION 1..84: note = Description of Unknown:cds_NZ_WFIY01000004.1_cds_WP_155863661.1_1539 target sequence
IIIGLLTRLAALGALAMSVGFAPAYWLGSTCEDEWQIGALLTAGSITLMLTAAGRVWGLDYFLYKKLGDRPIANVPILKWIKLW

SEQ ID NO: 40888 - protein, 85 aa, unidentified
  REGION 1..85: note = Description of Unknown:cds_NZ_WFIY01000004.1_cds_WP_155863661.1_1539 target sequence
GWMFLDGGLRKAVLKPAKLDPNSASFVGGKLVNFLPHAGPFKGFLLMTLENRSLDVTFLTVFSYIEIIAGLFIIIGLLTRLAALG

SEQ ID NO: 40889 - protein, 85 aa, unidentified
  REGION 1..85: note = Description of Unknown:cds_NZ_WFIY01000004.1_cds_WP_155864391.1_921 target sequence
SIKGYLFGDKIVIFDINDSKKLYSTGFYGKPLGINKPKKAEDIKYPLELSLIEGLYLLKKGEIEVIYNGNKLNENDLYEIGRKNI

SEQ ID NO: 40890 - protein, 85 aa, unidentified
  REGION 1..85: note = Description of Unknown:cds_NZ_WFIY01000004.1_cds_WP_155864391.1_921 target sequence
ARFDSLFIVYSDLRNKGFVVRSGIKFGADFAIYTLGPGIEHAPYVVIVLDANSTLLANELMSFGRVSHSTRKKLILAIVNMLSPK

SEQ ID NO: 40891 - protein, 84 aa, unidentified
  REGION 1..84: note = Description of Unknown:cds_NZ_WFIY01000004.1_cds_WP_155864391.1_921 target sequence
RNKGFVVRSGIKFGADFAIYTLGPGIEHAPYVVIVLDANSTLLANELMSFGRVSHSTRKKLILAIVNMLSPKNIRYVMFKWVKL

SEQ ID NO: 40892 - protein, 85 aa, unidentified
  REGION 1..85: note = Description of Unknown:cds_NZ_WFIY01000004.1_cds_WP_155864391.1_921 target sequence
YGKPLGINKPKKAEDIKYPLELSLIEGLYLLKKGEIEVIYNGNKLNENDLYEIGRKNIARFDSLFIVYSDLRNKGFVVRSGIKFG

SEQ ID NO: 40893 - protein, 85 aa, unidentified
  REGION 1..85: note = Description of Unknown:cds_NZ_WFIY01000004.1_cds_WP_155863781.1_1662 target sequence
IPILLPLIVASLVPHSSLIYAVQVNVNNTIYSFTYNFTVICIKNNTIEFNLTIVGNNYYNVMEYNVNEDNPYPLPINCMAFNTTN

SEQ ID NO: 40894 - protein, 85 aa, unidentified
  REGION 1..85: note = Description of Unknown:cds_NZ_WFIY01000004.1_cds_WP_155863781.1_1662 target sequence
LEFIRNATLNGNLTKEFSGIFDALGKYKVPVTVYFHDGILQQLNGTYNGVSVYVSREYPTIISTTPSSESLSNYLTLIIFIVVLI

SEQ ID NO: 40895 - protein, 84 aa, unidentified
  REGION 1..84: note = Description of Unknown:cds_NZ_WFIY01000004.1_cds_WP_155863781.1_1662 target sequence
TKEFSGIFDALGKYKVPVTVYFHDGILQQLNGTYNGVSVYVSREYPTIISTTPSSESLSNYLTLIIFIVVLIIAIFVLIKIGKI

SEQ ID NO: 40896 - protein, 85 aa, unidentified
  REGION 1..85: note = Description of Unknown:cds_NZ_WFIY01000004.1_cds_WP_155863781.1_1662 target sequence
NTIYSFTYNFTVICIKNNTIEFNLTIVGNNYYNVMEYNVNEDNPYPLPINCMAFNTTNLEFIRNATLNGNLTKEFSGIFDALGKY

SEQ ID NO: 40897 - protein, 85 aa, unidentified
  REGION 1..85: note = Description of Unknown:cds_NZ_WFIY01000004.1_cds_WP_155863989.1_1914 target sequence
ILILAENEIPEAEYVTYFSKDDISFIFLHYKEGFYRYIGLYKKNKGVISRVRNIPFYLPFKYVKKLHDNYLLLYLKDDKEKQVII

SEQ ID NO: 40898 - protein, 85 aa, unidentified
  REGION 1..85: note = Description of Unknown:cds_NZ_WFIY01000004.1_cds_WP_155863989.1_1914 target sequence
PAVKAEAYEYLYSQLAYTIEYMMDKLKIEVSPEQGKEIIDILKRSDSIGEEKGEAIYSLKVYRLPETVQNSMEVFSDYPLYPPLE

SEQ ID NO: 40899 - protein, 84 aa, unidentified
  REGION 1..84: note = Description of Unknown:cds_NZ_WFIY01000004.1_cds_WP_155863989.1_1914 target sequence
QLAYTIEYMMDKLKIEVSPEQGKEIIDILKRSDSIGEEKGEAIYSLKVYRLPETVQNSMEVFSDYPLYPPLEVFKEGFEDNNLF

SEQ ID NO: 40900 - protein, 85 aa, unidentified
  REGION 1..85: note = Description of Unknown:cds_NZ_WFIY01000004.1_cds_WP_155863989.1_1914 target sequence
LHYKEGFYRYIGLYKKNKGVISRVRNIPFYLPFKYVKKLHDNYLLLYLKDDKEKQVIIPAVKAEAYEYLYSQLAYTIEYMMDKLK

SEQ ID NO: 40901 - protein, 85 aa, unidentified
  REGION 1..85: note = Description of Unknown:cds_NC_035460.1_cds_YP_009408070.1_119 target sequence
LKNNNTCMAQKEIICAFDIGAKNPARTIIEINNNNIKIIDISKLDWSTDWEKKIAKDVSQYKYTTVLLERQPRRSPYVKFIYFIK

SEQ ID NO: 40902 - protein, 85 aa, unidentified
  REGION 1..85: note = Description of Unknown:cds_NC_035460.1_cds_YP_009408070.1_119 target sequence
GFLFNTSTKVICVSPVMSGNSYRDRKRRSVETFLIWMNTFNLRNAVPNRKKLDDVADSFNLVMRYILDKYNIMYTPYIKVKKSKK

SEQ ID NO: 40903 - protein, 84 aa, unidentified
  REGION 1..84: note = Description of Unknown:cds_NC_035460.1_cds_YP_009408070.1_119 target sequence
SPVMSGNSYRDRKRRSVETFLIWMNTFNLRNAVPNRKKLDDVADSFNLVMRYILDKYNIMYTPYIKVKKSKKCKNDVESIKLTL

SEQ ID NO: 40904 - protein, 85 aa, unidentified
  REGION 1..85: note = Description of Unknown:cds_NC_035460.1_cds_YP_009408070.1_119 target sequence
IIEINNNNIKIIDISKLDWSTDWEKKIAKDVSQYKYTTVLLERQPRRSPYVKFIYFIKGFLFNTSTKVICVSPVMSGNSYRDRKR

SEQ ID NO: 40905 - protein, 85 aa, unidentified
  REGION 1..85: note = Description of Unknown:cds_NC_003214.2_cds_NP_445724.1_59 target sequence
INIERVLYIVYSSLLNNIPTYGAIANINGSPINLQAKYSNSTLTLQGDIIIQATTNTLTIEIYIGNYPIDSISLNVALSPGTYTL

SEQ ID NO: 40906 - protein, 85 aa, unidentified
  REGION 1..85: note = Description of Unknown:cds_NC_003214.2_cds_NP_445724.1_59 target sequence
VYTLTINDSTGIINNAFGYAVTNQLKSVSISTNSTLYTISYTQNMLTFYLEYTSYPTTVSITVTFTLTNGSTVTGSYSNSIQGTT

SEQ ID NO: 40907 - protein, 84 aa, unidentified
  REGION 1..84: note = Description of Unknown:cds_NC_003214.2_cds_NP_445724.1_59 target sequence
NNAFGYAVTNQLKSVSISTNSTLYTISYTQNMLTFYLEYTSYPTTVSITVTFTLTNGSTVTGSYSNSIQGTTLYGIVIPVTFEV

SEQ ID NO: 40908 - protein, 85 aa, unidentified
  REGION 1..85: note = Description of Unknown:cds_NC_003214.2_cds_NP_445724.1_59 target sequence
NGSPINLQAKYSNSTLTLQGDIIIQATTNTLTIEIYIGNYPIDSISLNVALSPGTYTLVYTLTINDSTGIINNAFGYAVTNQLKS

SEQ ID NO: 40909 - protein, 85 aa, unidentified
  REGION 1..85: note = Description of Unknown:cds_NC_030656.1_cds_YP_009268776.1_61 target sequence
TTASYEFIKAYVPRGAIIFVNSWHSLTEQFNPSNDKHAAIYFGDKLCTHLLKTRCVSYDNICDSTLYAIESTAVKGAHIIPLKTL

SEQ ID NO: 40910 - protein, 85 aa, unidentified
  REGION 1..85: note = Description of Unknown:cds_NC_030656.1_cds_YP_009268776.1_61 target sequence
ITKSDIKIYILDNFDSPYKIMEQAADNALELVGAPYGFNSNNLYCFKMVANCFEAAGVDVSTYRLLGKDIYLSQSFTNDPKWKKI

SEQ ID NO: 40911 - protein, 84 aa, unidentified
  REGION 1..84: note = Description of Unknown:cds_NC_030656.1_cds_YP_009268776.1_61 target sequence
FDSPYKIMEQAADNALELVGAPYGFNSNNLYCFKMVANCFEAAGVDVSTYRLLGKDIYLSQSFTNDPKWKKIYSSESNNMCSIV

SEQ ID NO: 40912 - protein, 85 aa, unidentified
  REGION 1..85: note = Description of Unknown:cds_NC_030656.1_cds_YP_009268776.1_61 target sequence
EQFNPSNDKHAAIYFGDKLCTHLLKTRCVSYDNICDSTLYAIESTAVKGAHIIPLKTLITKSDIKIYILDNFDSPYKIMEQAADN

SEQ ID NO: 40913 - protein, 85 aa, unidentified
  REGION 1..85: note = Description of Unknown:cds_NC_038931.1_cds_YP_009509144.1_28 target sequence
SDVGYCSPPGKNNSDYLTAFHCVSREMCNIVSNIQLSDGTKVNVIKTPYMKHCSNILCRLLFEIGLNRLFPMCIEDEDLAWISAG

SEQ ID NO: 40914 - protein, 85 aa, unidentified
  REGION 1..85: note = Description of Unknown:cds_NC_038931.1_cds_YP_009509144.1_28 target sequence
NNIGPTKGVLFAGSLGSIYGSIAIFSGDLIVGKKYKVISRDFYIGKTIEWETTINGKGIFYVLYENGKGIWIRGYYSFPTQVRIK

SEQ ID NO: 40915 - protein, 84 aa, unidentified
  REGION 1..84: note = Description of Unknown:cds_NC_038931.1_cds_YP_009509144.1_28 target sequence
GSLGSIYGSIAIFSGDLIVGKKYKVISRDFYIGKTIEWETTINGKGIFYVLYENGKGIWIRGYYSFPTQVRIKPGFSGSPVIEE

SEQ ID NO: 40916 - protein, 85 aa, unidentified
  REGION 1..85: note = Description of Unknown:cds_NC_038931.1_cds_YP_009509144.1_28 target sequence
CNIVSNIQLSDGTKVNVIKTPYMKHCSNILCRLLFEIGLNRLFPMCIEDEDLAWISAGNNIGPTKGVLFAGSLGSIYGSIAIFSG

SEQ ID NO: 40917 - protein, 85 aa, unidentified
  REGION 1..85: note = Description of Unknown:cds_NZ_WFIY01000004.1_cds_WP_155862588.1_361 target sequence
RLFIAIKVPQFQKLNDVYNEIKLSGADVKLVEIDNIHITLIFIGEVPDNKVDLVKEAVSLLQFNKFKISMKGMGAFPSITKPRVV

SEQ ID NO: 40918 - protein, 85 aa, unidentified
  REGION 1..85: note = Description of Unknown:cds_NZ_WFIY01000004.1_cds_WP_155862588.1_361 target sequence
WVGISEGFIQLREIRSFLLKELRSRGIRPEDEKEFVPHITLGRVKGPSNLFNLANVINQHYNDYFGDFIVDKVILYKSTLTPKGP

SEQ ID NO: 40919 - protein, 84 aa, unidentified
  REGION 1..84: note = Description of Unknown:cds_NZ_WFIY01000004.1_cds_WP_155862588.1_361 target sequence
EIRSFLLKELRSRGIRPEDEKEFVPHITLGRVKGPSNLFNLANVINQHYNDYFGDFIVDKVILYKSTLTPKGPIYDEILGVTGK

SEQ ID NO: 40920 - protein, 85 aa, unidentified
  REGION 1..85: note = Description of Unknown:cds_NZ_WFIY01000004.1_cds_WP_155862588.1_361 target sequence
VKLVEIDNIHITLIFIGEVPDNKVDLVKEAVSLLQFNKFKISMKGMGAFPSITKPRVVWVGISEGFIQLREIRSFLLKELRSRGI

SEQ ID NO: 40921 - protein, 85 aa, unidentified
  REGION 1..85: note = Description of Unknown:cds_NZ_WFIY01000004.1_cds_WP_155862700.1_500 target sequence
FEGIIDGLKYALKYERSILRRYLILGSFDGLLLTLGIIMSAIVEHIKVKDTEIAILSGLTAVSISSIWNSLIVEAKEKREEYKEL

SEQ ID NO: 40922 - protein, 85 aa, unidentified
  REGION 1..85: note = Description of Unknown:cds_NZ_WFIY01000004.1_cds_WP_155862700.1_500 target sequence
ERQMMKSLKGTIYDYGTKATIVLSAFAHGISPFLGLIVLYSYITTRNMVMVLSASSFVLFLLGLSYEGEIKDKIESGLLILIAGL

SEQ ID NO: 40923 - protein, 84 aa, unidentified
  REGION 1..84: note = Description of Unknown:cds_NZ_WFIY01000004.1_cds_WP_155862700.1_500 target sequence
YDYGTKATIVLSAFAHGISPFLGLIVLYSYITTRNMVMVLSASSFVLFLLGLSYEGEIKDKIESGLLILIAGLFTAFLTYLLGS

SEQ ID NO: 40924 - protein, 85 aa, unidentified
  REGION 1..85: note = Description of Unknown:cds_NZ_WFIY01000004.1_cds_WP_155862700.1_500 target sequence
FDGLLLTLGIIMSAIVEHIKVKDTEIAILSGLTAVSISSIWNSLIVEAKEKREEYKELERQMMKSLKGTIYDYGTKATIVLSAFA

SEQ ID NO: 40925 - protein, 85 aa, unidentified
  REGION 1..85: note = Description of Unknown:cds_NZ_WFIY01000004.1_cds_WP_155863247.1_1195 target sequence
LLLILTATLSVIEGINIYKGILFSSYLIDFGKRVQGLVFILVASLLPVLFIFFSFYLVVQSELLVLGVILALSYLPKIILWKYYH

SEQ ID NO: 40926 - protein, 85 aa, unidentified
  REGION 1..85: note = Description of Unknown:cds_NZ_WFIY01000004.1_cds_WP_155863247.1_1195 target sequence
YSSNYIPSLTNAVKWYVINYIIKMDFILPMYISLLGLNYLLVFILVGLITRMIAIIIIRNFKPLFLKIIRLNLPQVENLSSILVI

SEQ ID NO: 40927 - protein, 84 aa, unidentified
  REGION 1..84: note = Description of Unknown:cds_NZ_WFIY01000004.1_cds_WP_155863247.1_1195 target sequence
VKWYVINYIIKMDFILPMYISLLGLNYLLVFILVGLITRMIAIIIIRNFKPLFLKIIRLNLPQVENLSSILVISTLLIVLHDSI

SEQ ID NO: 40928 - protein, 85 aa, unidentified
  REGION 1..85: note = Description of Unknown:cds_NZ_WFIY01000004.1_cds_WP_155863247.1_1195 target sequence
IDFGKRVQGLVFILVASLLPVLFIFFSFYLVVQSELLVLGVILALSYLPKIILWKYYHYSSNYIPSLTNAVKWYVINYIIKMDFI

SEQ ID NO: 40929 - protein, 85 aa, unidentified
  REGION 1..85: note = Description of Unknown:cds_NZ_WFIY01000004.1_cds_WP_155863743.1_1613 target sequence
RTLKKNLSDLKVVIMAGGKGSRLSPMKPVIKVCGKPMILWVYEFSKQFSDKIFVATVKDHPALPKLREIIPTNDIIFTEGKGYEF

SEQ ID NO: 40930 - protein, 85 aa, unidentified
  REGION 1..85: note = Description of Unknown:cds_NZ_WFIY01000004.1_cds_WP_155863743.1_1613 target sequence
DVIEAVKSVGLPCLVFPSDTPFIPKDAVEKLVNECETSICTLLSKGEFVGISLWNSLDTSSFSSINTAHEIVNVNTNKDLLKINE

SEQ ID NO: 40931 - protein, 84 aa, unidentified
  REGION 1..84: note = Description of Unknown:cds_NZ_WFIY01000004.1_cds_WP_155863743.1_1613 target sequence
CLVFPSDTPFIPKDAVEKLVNECETSICTLLSKGEFVGISLWNSLDTSSFSSINTAHEIVNVNTNKDLLKINEKCSEGFIWGKE

SEQ ID NO: 40932 - protein, 85 aa, unidentified
  REGION 1..85: note = Description of Unknown:cds_NZ_WFIY01000004.1_cds_WP_155863743.1_1613 target sequence
PVIKVCGKPMILWVYEFSKQFSDKIFVATVKDHPALPKLREIIPTNDIIFTEGKGYEFDVIEAVKSVGLPCLVFPSDTPFIPKDA

SEQ ID NO: 40933 - protein, 85 aa, unidentified
  REGION 1..85: note = Description of Unknown:cds_NZ_WFIY01000004.1_cds_WP_155863827.1_1720 target sequence
ALGKETEMGLKELFKANAEDYLTLTFLADKLEALGRKEEAKLLREKARVEYGHAMGIFEKLLQNADVTKLLGEFVKEEDQEHVAE

SEQ ID NO: 40934 - protein, 85 aa, unidentified
  REGION 1..85: note = Description of Unknown:cds_NZ_WFIY01000004.1_cds_WP_155863827.1_1720 target sequence
YDNVAMKAKEEGHLDVEKMLCSYAEQEKDIAESTAKVLALLSDFAREEDMEHVSEYNDVAMKAKEEGHADIEAMLCAYAEQEKQI

SEQ ID NO: 40935 - protein, 84 aa, unidentified
  REGION 1..84: note = Description of Unknown:cds_NZ_WFIY01000004.1_cds_WP_155863827.1_1720 target sequence
HLDVEKMLCSYAEQEKDIAESTAKVLALLSDFAREEDMEHVSEYNDVAMKAKEEGHADIEAMLCAYAEQEKQIAETAKKVAKAL

SEQ ID NO: 40936 - protein, 85 aa, unidentified
  REGION 1..85: note = Description of Unknown:cds_NZ_WFIY01000004.1_cds_WP_155863827.1_1720 target sequence
ADKLEALGRKEEAKLLREKARVEYGHAMGIFEKLLQNADVTKLLGEFVKEEDQEHVAEYDNVAMKAKEEGHLDVEKMLCSYAEQE

SEQ ID NO: 40937 - protein, 85 aa, unidentified
  REGION 1..85: note = Description of Unknown:cds_NZ_WFIY01000004.1_cds_WP_155864089.1_2034 target sequence
MRWEIILRGRGGMGVVTAGETLVKAAVKEGKYGQSIPFFGGERRGAPVVSYVRLSDEPIYIHREIYNSDLVAVFDTSLFNILNPL

SEQ ID NO: 40938 - protein, 85 aa, unidentified
  REGION 1..85: note = Description of Unknown:cds_NZ_WFIY01000004.1_cds_WP_155864089.1_2034 target sequence
EGLKEDGILLLNTKTPKKLWKNTFYVDAVEIADKLNLSIAGWKLVNMPMVGAIAKVTGMIKIDSVVEAIEEEFSGKLGELNAEAA

SEQ ID NO: 40939 - protein, 84 aa, unidentified
  REGION 1..84: note = Description of Unknown:cds_NZ_WFIY01000004.1_cds_WP_155864089.1_2034 target sequence
TKTPKKLWKNTFYVDAVEIADKLNLSIAGWKLVNMPMVGAIAKVTGMIKIDSVVEAIEEEFSGKLGELNAEAAKLGYEMVSKYD

SEQ ID NO: 40940 - protein, 85 aa, unidentified
  REGION 1..85: note = Description of Unknown:cds_NZ_WFIY01000004.1_cds_WP_155864089.1_2034 target sequence
KEGKYGQSIPFFGGERRGAPVVSYVRLSDEPIYIHREIYNSDLVAVFDTSLFNILNPLEGLKEDGILLLNTKTPKKLWKNTFYVD

SEQ ID NO: 40941 - protein, 85 aa, unidentified
  REGION 1..85: note = Description of Unknown:cds_NC_029316.1_cds_YP_009230300.1_47 target sequence
AKEKDEEKDEKTADEIFKLITIDPVQTQQLYNNANQDNIPPDIYDTEIRTTSEDVVNLAKYIMKSITEQFKQYDIKYSVTPSSID

SEQ ID NO: 40942 - protein, 85 aa, unidentified
  REGION 1..85: note = Description of Unknown:cds_NC_029316.1_cds_YP_009230300.1_47 target sequence
EAFKRLLTSAVNNYMALNSSIMTYYQANIRKAIREKNISDVLMYMEKMKKITIAILMSIHMTINEIMGIIGINLPLEITSQLYKH

SEQ ID NO: 40943 - protein, 84 aa, unidentified
  REGION 1..84: note = Description of Unknown:cds_NC_029316.1_cds_YP_009230300.1_47 target sequence
NYMALNSSIMTYYQANIRKAIREKNISDVLMYMEKMKKITIAILMSIHMTINEIMGIIGINLPLEITSQLYKHTVLGIDHIEAK

SEQ ID NO: 40944 - protein, 85 aa, unidentified
  REGION 1..85: note = Description of Unknown:cds_NC_029316.1_cds_YP_009230300.1_47 target sequence
QQLYNNANQDNIPPDIYDTEIRTTSEDVVNLAKYIMKSITEQFKQYDIKYSVTPSSIDEAFKRLLTSAVNNYMALNSSIMTYYQA

SEQ ID NO: 40945 - protein, 85 aa, unidentified
  REGION 1..85: note = Description of Unknown:cds_NC_030656.1_cds_YP_009268821.1_106 target sequence
ADKITPRSSYDDYMTTLKKLAPQLKTLLSHISSEQTGMQPPLLAAPDTSAVDTTIESVCAAGSPFEATARKKTSRTKSTPSKRSV

SEQ ID NO: 40946 - protein, 85 aa, unidentified
  REGION 1..85: note = Description of Unknown:cds_NC_030656.1_cds_YP_009268821.1_106 target sequence
KMGAPRSRRPMEDDNMMQAVTNCGKIVFGTVRDGKLEVKGTVGEVNADLLGVDLVNAGRKPRTTKSSGDTKPTRRRRQTTVMYNK

SEQ ID NO: 40947 - protein, 84 aa, unidentified
  REGION 1..84: note = Description of Unknown:cds_NC_030656.1_cds_YP_009268821.1_106 target sequence
DDNMMQAVTNCGKIVFGTVRDGKLEVKGTVGEVNADLLGVDLVNAGRKPRTTKSSGDTKPTRRRRQTTVMYNKDSIECPDSGMC

SEQ ID NO: 40948 - protein, 85 aa, unidentified
  REGION 1..85: note = Description of Unknown:cds_NC_030656.1_cds_YP_009268821.1_106 target sequence
LSHISSEQTGMQPPLLAAPDTSAVDTTIESVCAAGSPFEATARKKTSRTKSTPSKRSVKMGAPRSRRPMEDDNMMQAVTNCGKIV

SEQ ID NO: 40949 - protein, 85 aa, unidentified
  REGION 1..85: note = Description of Unknown:cds_NZ_WFIY01000004.1_cds_WP_155862376.1_110 target sequence
MFLQDALIVALLGLTHGLDPDHIATARILKNSVKVLKFSIFHSLGFAILAIPLTVILIITSINSVYLNIIGNLIGISVALILLAS

SEQ ID NO: 40950 - protein, 85 aa, unidentified
  REGION 1..85: note = Description of Unknown:cds_NZ_WFIY01000004.1_cds_WP_155862376.1_110 target sequence
AILGKEFEIEPKEMGLLQGSLAVTPSKIITVVLAISLDNIIYSTAIVGIFILSSTFSIFALSSLNMIPRKFDKPINVAISLLTII

SEQ ID NO: 40951 - protein, 84 aa, unidentified
  REGION 1..84: note = Description of Unknown:cds_NZ_WFIY01000004.1_cds_WP_155862376.1_110 target sequence
KEMGLLQGSLAVTPSKIITVVLAISLDNIIYSTAIVGIFILSSTFSIFALSSLNMIPRKFDKPINVAISLLTIIFLGFSTFEVL

SEQ ID NO: 40952 - protein, 85 aa, unidentified
  REGION 1..85: note = Description of Unknown:cds_NZ_WFIY01000004.1_cds_WP_155862376.1_110 target sequence
ILKNSVKVLKFSIFHSLGFAILAIPLTVILIITSINSVYLNIIGNLIGISVALILLASAILGKEFEIEPKEMGLLQGSLAVTPSK

SEQ ID NO: 40953 - protein, 85 aa, unidentified
  REGION 1..85: note = Description of Unknown:cds_NZ_WFIY01000004.1_cds_202 target sequence
VATVTLDQQLDLYAMERSVPNVEYDPDQFPGLIFRLESPKVTSLIFKSGKMVVTGAKSTEELIKAVKRIIKTLKKYGIKITGKPK

SEQ ID NO: 40954 - protein, 85 aa, unidentified
  REGION 1..85: note = Description of Unknown:cds_NZ_WFIY01000004.1_cds_202 target sequence
IQIQNIVASANMHVHVNLDKAAFLLENNMYEPEQFPGLIFRMDDPRVVLLIFSSGKMVITGAKREEEVYKAVKKIFDKLNELDCI

SEQ ID NO: 40955 - protein, 84 aa, unidentified
  REGION 1..84: note = Description of Unknown:cds_NZ_WFIY01000004.1_cds_202 target sequence
HVHVNLDKAAFLLENNMYEPEQFPGLIFRMDDPRVVLLIFSSGKMVITGAKREEEVYKAVKKIFDKLNELDCIKPIEEEEELEI

SEQ ID NO: 40956 - protein, 85 aa, unidentified
  REGION 1..85: note = Description of Unknown:cds_NZ_WFIY01000004.1_cds_202 target sequence
QFPGLIFRLESPKVTSLIFKSGKMVVTGAKSTEELIKAVKRIIKTLKKYGIKITGKPKIQIQNIVASANMHVHVNLDKAAFLLEN

SEQ ID NO: 40957 - protein, 85 aa, unidentified
  REGION 1..85: note = Description of Unknown:cds_NZ_WFIY01000004.1_cds_WP_155862698.1_498 target sequence
QHILEREDKQEELTREIKSIIKEIENDDLKVVTFMEYTSPPKEIKPKVIKFNKALELLRLIAKQGKIQKGVAKIMFYSPSTERSR

SEQ ID NO: 40958 - protein, 85 aa, unidentified
  REGION 1..85: note = Description of Unknown:cds_NZ_WFIY01000004.1_cds_WP_155862698.1_498 target sequence
GLTPTMMAGFQYIEPGVATKPHSHNMASIYLVVKGKGYSIIDGKKYYWEEGDIFVVPANAVHSHVNTSNEEVVLFDVTDSGLLEN

SEQ ID NO: 40959 - protein, 84 aa, unidentified
  REGION 1..84: note = Description of Unknown:cds_NZ_WFIY01000004.1_cds_WP_155862698.1_498 target sequence
YIEPGVATKPHSHNMASIYLVVKGKGYSIIDGKKYYWEEGDIFVVPANAVHSHVNTSNEEVVLFDVTDSGLLENLGILEFKEED

SEQ ID NO: 40960 - protein, 85 aa, unidentified
  REGION 1..85: note = Description of Unknown:cds_NZ_WFIY01000004.1_cds_WP_155862698.1_498 target sequence
DLKVVTFMEYTSPPKEIKPKVIKFNKALELLRLIAKQGKIQKGVAKIMFYSPSTERSRGLTPTMMAGFQYIEPGVATKPHSHNMA

SEQ ID NO: 40961 - protein, 85 aa, unidentified
  REGION 1..85: note = Description of Unknown:cds_NZ_WFIY01000004.1_cds_WP_155862897.1_744 target sequence
LQVLVKESLKIPNNVSLTLENGKIKVKGPKGEVEKDISHMRGIEVRLENGELIVEATFANKRTKSLVYTLLRHVQNMITGVTKGY

SEQ ID NO: 40962 - protein, 85 aa, unidentified
  REGION 1..85: note = Description of Unknown:cds_NZ_WFIY01000004.1_cds_WP_155862897.1_744 target sequence
RYYLKIIFTHFPTSVKVVGNEVQITNLIGEKNIRRAKILPGVKVTVKGEDIIVEGIDLEKVAQTAANIERASKISGFDRRVFGDG

SEQ ID NO: 40963 - protein, 84 aa, unidentified
  REGION 1..84: note = Description of Unknown:cds_NZ_WFIY01000004.1_cds_WP_155862897.1_744 target sequence
PTSVKVVGNEVQITNLIGEKNIRRAKILPGVKVTVKGEDIIVEGIDLEKVAQTAANIERASKISGFDRRVFGDGIYIYKKEVIE

SEQ ID NO: 40964 - protein, 85 aa, unidentified
  REGION 1..85: note = Description of Unknown:cds_NZ_WFIY01000004.1_cds_WP_155862897.1_744 target sequence
GPKGEVEKDISHMRGIEVRLENGELIVEATFANKRTKSLVYTLLRHVQNMITGVTKGYRYYLKIIFTHFPTSVKVVGNEVQITNL

SEQ ID NO: 40965 - protein, 85 aa, unidentified
  REGION 1..85: note = Description of Unknown:cds_NZ_WFIY01000004.1_cds_WP_155863282.1_1238 target sequence
IILTDRQLDKKFVRFLLDTGVAKRTSLRYITIYDKYPVIFYSASMIENQNYVELRLKGIIMSKNEVEIELIPPMGVVSRSKIVEE

SEQ ID NO: 40966 - protein, 85 aa, unidentified
  REGION 1..85: note = Description of Unknown:cds_NZ_WFIY01000004.1_cds_WP_155863282.1_1238 target sequence
GVKITIDGQFFNIRKKVYASNINITNKILYSGIWIKYPTYIFTMSCKLKGLKFYFSRTSDINNYQTLLSSPDRIINKPFIRILKV

SEQ ID NO: 40967 - protein, 84 aa, unidentified
  REGION 1..84: note = Description of Unknown:cds_NZ_WFIY01000004.1_cds_WP_155863282.1_1238 target sequence
NIRKKVYASNINITNKILYSGIWIKYPTYIFTMSCKLKGLKFYFSRTSDINNYQTLLSSPDRIINKPFIRILKVQSGVYLLGTY

SEQ ID NO: 40968 - protein, 85 aa, unidentified
  REGION 1..85: note = Description of Unknown:cds_NZ_WFIY01000004.1_cds_WP_155863282.1_1238 target sequence
RYITIYDKYPVIFYSASMIENQNYVELRLKGIIMSKNEVEIELIPPMGVVSRSKIVEEGVKITIDGQFFNIRKKVYASNINITNK

SEQ ID NO: 40969 - protein, 85 aa, unidentified
  REGION 1..85: note = Description of Unknown:cds_NZ_WFIY01000004.1_cds_WP_155863740.1_1610 target sequence
EERDEVLLKLKEAVDLFVNTPGTHLLIPEIRTNIGYAIKGAKNVNDVAAIPGRISVAFNRAIYCMPPAFGASDHVARVILTAMLH

SEQ ID NO: 40970 - protein, 85 aa, unidentified
  REGION 1..85: note = Description of Unknown:cds_NZ_WFIY01000004.1_cds_WP_155863740.1_1610 target sequence
DENMRSAINLKFYEEIVKKLSDVFIFNRKEEPEESKEKERHTMNFMVDLAYSRLGRIPRYIVDLGDYGKEPSIFILGKEPIEVVK

SEQ ID NO: 40971 - protein, 84 aa, unidentified
  REGION 1..84: note = Description of Unknown:cds_NZ_WFIY01000004.1_cds_WP_155863740.1_1610 target sequence
FYEEIVKKLSDVFIFNRKEEPEESKEKERHTMNFMVDLAYSRLGRIPRYIVDLGDYGKEPSIFILGKEPIEVVKEAINLLQFIQ

SEQ ID NO: 40972 - protein, 85 aa, unidentified
  REGION 1..85: note = Description of Unknown:cds_NZ_WFIY01000004.1_cds_WP_155863740.1_1610 target sequence
PEIRTNIGYAIKGAKNVNDVAAIPGRISVAFNRAIYCMPPAFGASDHVARVILTAMLHDENMRSAINLKFYEEIVKKLSDVFIFN

SEQ ID NO: 40973 - protein, 85 aa, unidentified
  REGION 1..85: note = Description of Unknown:cds_NZ_WFIY01000004.1_cds_WP_155863929.1_1843 target sequence
HVNSLEELINEYGFTDEEINFALERAKGIIFGFAMEYRARKVLENYNFTNIKSVNLPTHDIEAEKDGEKYYIEVKASKKSPTKEY

SEQ ID NO: 40974 - protein, 85 aa, unidentified
  REGION 1..85: note = Description of Unknown:cds_NZ_WFIY01000004.1_cds_WP_155863929.1_1843 target sequence
SAYKIAMIAQLHGIHLTLVMLPSPRLYLTEEILSEPKKVLFEFFKMLFNNENDKLKAFLANDKNRKIVESYNKIIIHYFPEIKDL

SEQ ID NO: 40975 - protein, 84 aa, unidentified
  REGION 1..84: note = Description of Unknown:cds_NZ_WFIY01000004.1_cds_WP_155863929.1_1843 target sequence
HGIHLTLVMLPSPRLYLTEEILSEPKKVLFEFFKMLFNNENDKLKAFLANDKNRKIVESYNKIIIHYFPEIKDLTSLEIIRPIL

SEQ ID NO: 40976 - protein, 85 aa, unidentified
  REGION 1..85: note = Description of Unknown:cds_NZ_WFIY01000004.1_cds_WP_155863929.1_1843 target sequence
GIIFGFAMEYRARKVLENYNFTNIKSVNLPTHDIEAEKDGEKYYIEVKASKKSPTKEYSAYKIAMIAQLHGIHLTLVMLPSPRLY

SEQ ID NO: 40977 - protein, 85 aa, unidentified
  REGION 1..85: note = Description of Unknown:cds_NC_009884.1_cds_YP_001496939.1_14 target sequence
TILNYNTIGIKGKTAEEFLYRYITGERKFAVIRSVNDNKLDVMKLKVMTIYEKVIASGDAKIRTIIPVVDDSGYVDNYKLMKYKN

SEQ ID NO: 40978 - protein, 85 aa, unidentified
  REGION 1..85: note = Description of Unknown:cds_NC_009884.1_cds_YP_001496939.1_14 target sequence
LILRYDNLPAHAIAKTVYINAIKMGYTYNYKKRVVSLLIFTIDKLSLTLNCDTRNVVVNVVRKICNDKGFENCNDIDKSNVASKV

SEQ ID NO: 40979 - protein, 84 aa, unidentified
  REGION 1..84: note = Description of Unknown:cds_NC_009884.1_cds_YP_001496939.1_14 target sequence
AIAKTVYINAIKMGYTYNYKKRVVSLLIFTIDKLSLTLNCDTRNVVVNVVRKICNDKGFENCNDIDKSNVASKVKTYISAFAKK

SEQ ID NO: 40980 - protein, 85 aa, unidentified
  REGION 1..85: note = Description of Unknown:cds_NC_009884.1_cds_YP_001496939.1_14 target sequence
KFAVIRSVNDNKLDVMKLKVMTIYEKVIASGDAKIRTIIPVVDDSGYVDNYKLMKYKNLILRYDNLPAHAIAKTVYINAIKMGYT

SEQ ID NO: 40981 - protein, 85 aa, unidentified
  REGION 1..85: note = Description of Unknown:hvTR_A7XCK1 target sequence
SWSINLGNGGDNFKTLDEIRAHVKSTTESVEEVTEEIFPDDIEIPSQKAPTKKKTTSRKKQTVQKPKCVGKEKNVKHESDDDKTE

SEQ ID NO: 40982 - protein, 85 aa, unidentified
  REGION 1..85: note = Description of Unknown:hvTR_A7XCK1 target sequence
ENEKSKESLSKNDDSNEEDIETSDLKIATEQIVKDLKIINSRINAIHTVLEDVQASSISRQFTSLSKSVDGLKAAVESGKIKVVR

SEQ ID NO: 40983 - protein, 84 aa, unidentified
  REGION 1..84: note = Description of Unknown:hvTR_A7XCK1 target sequence
KNDDSNEEDIETSDLKIATEQIVKDLKIINSRINAIHTVLEDVQASSISRQFTSLSKSVDGLKAAVESGKIKVVRKKSRQHSKK

SEQ ID NO: 40984 - protein, 85 aa, unidentified
  REGION 1..85: note = Description of Unknown:hvTR_A7XCK1 target sequence
ESVEEVTEEIFPDDIEIPSQKAPTKKKTTSRKKQTVQKPKCVGKEKNVKHESDDDKTEENEKSKESLSKNDDSNEEDIETSDLKI

SEQ ID NO: 40985 - protein, 85 aa, unidentified
  REGION 1..85: note = Description of Unknown:hvTR_Q6TUT9 target sequence
SWSINLGNGGDNFKTLDEIRAHVKSTTESVDEVTEEIFPSDIEIPSQKTPIKKRAVTRKKQTTVSKPKCSGKEKLIKPESDNEKT

SEQ ID NO: 40986 - protein, 85 aa, unidentified
  REGION 1..85: note = Description of Unknown:hvTR_Q6TUT9 target sequence
EENEKSKENLSKNTNSDEDINDSDLKIATDKIIKDLKVLNSRISAISTVLEDVQASSVSRQFTSLGKSVDVLKATIESGKTKVTR

SEQ ID NO: 40987 - protein, 84 aa, unidentified
  REGION 1..84: note = Description of Unknown:hvTR_Q6TUT9 target sequence
SKNTNSDEDINDSDLKIATDKIIKDLKVLNSRISAISTVLEDVQASSVSRQFTSLGKSVDVLKATIESGKTKVTRKKPRHDLKK

SEQ ID NO: 40988 - protein, 85 aa, unidentified
  REGION 1..85: note = Description of Unknown:hvTR_Q6TUT9 target sequence
ESVDEVTEEIFPSDIEIPSQKTPIKKRAVTRKKQTTVSKPKCSGKEKLIKPESDNEKTEENEKSKENLSKNTNSDEDINDSDLKI

SEQ ID NO: 40989 - protein, 85 aa, unidentified
  REGION 1..85: note = Description of Unknown:hvTR_Q9DHN7 target sequence
SWSINLGNGGDNFKTLDEIRAHVKSTTESVEEVTEEIFPDDIEIPSQKTPTKKKTTSRKKQTVQKPKCVGKEKNVKHESDDDKTE

SEQ ID NO: 40990 - protein, 85 aa, unidentified
  REGION 1..85: note = Description of Unknown:hvTR_Q9DHN7 target sequence
ENEKSKESLSKNNDSNEEDIETSDLKIATDQIVKDLKIINSRINAIHTVLEDVQASSISRQFTSLSKSVDGLKAAVESGRIKVVR

SEQ ID NO: 40991 - protein, 84 aa, unidentified
  REGION 1..84: note = Description of Unknown:hvTR_Q9DHN7 target sequence
KNNDSNEEDIETSDLKIATDQIVKDLKIINSRINAIHTVLEDVQASSISRQFTSLSKSVDGLKAAVESGRIKVVRKKSRQYSKK

SEQ ID NO: 40992 - protein, 85 aa, unidentified
  REGION 1..85: note = Description of Unknown:hvTR_Q9DHN7 target sequence
ESVEEVTEEIFPDDIEIPSQKTPTKKKTTSRKKQTVQKPKCVGKEKNVKHESDDDKTEENEKSKESLSKNNDSNEEDIETSDLKI

SEQ ID NO: 40993 - protein, 85 aa, unidentified
  REGION 1..85: note = Description of Unknown:cds_NZ_WFIY01000004.1_cds_WP_155862295.1_9 target sequence
ISSLTSTRLILYIPVNERVKLLKKRGVKDFAEELAMKLYGRYKYTFNETTKNMILNVVNSYLRMENLSRGYMIWIYGLPLPLAYP

SEQ ID NO: 40994 - protein, 85 aa, unidentified
  REGION 1..85: note = Description of Unknown:cds_NZ_WFIY01000004.1_cds_WP_155862295.1_9 target sequence
DAIAKDTVIEIKPEENLQHATLQVLLYASVLTKVFKRVRPLLISVSHDGESKISGINVYSVLFMNSPIITGAEARIIMVEIIREL

SEQ ID NO: 40995 - protein, 84 aa, unidentified
  REGION 1..84: note = Description of Unknown:cds_NZ_WFIY01000004.1_cds_WP_155862295.1_9 target sequence
IKPEENLQHATLQVLLYASVLTKVFKRVRPLLISVSHDGESKISGINVYSVLFMNSPIITGAEARIIMVEIIRELAGKSNVLNS

SEQ ID NO: 40996 - protein, 85 aa, unidentified
  REGION 1..85: note = Description of Unknown:cds_NZ_WFIY01000004.1_cds_WP_155862295.1_9 target sequence
KDFAEELAMKLYGRYKYTFNETTKNMILNVVNSYLRMENLSRGYMIWIYGLPLPLAYPDAIAKDTVIEIKPEENLQHATLQVLLY

SEQ ID NO: 40997 - protein, 85 aa, unidentified
  REGION 1..85: note = Description of Unknown:cds_NZ_WFIY01000004.1_cds_WP_155863916.1_1828 target sequence
DLERMIVASKNLVRTGWMQKGIPPAIGETVADHSFEAAVIAYYLARKLNEKGININPDHAAVLALFHDAGESILGDLPKWTTERI

SEQ ID NO: 40998 - protein, 85 aa, unidentified
  REGION 1..85: note = Description of Unknown:cds_NZ_WFIY01000004.1_cds_WP_155863916.1_1828 target sequence
NKKDAEKEAFDEFGFGKELFVEFKEQKTIESKIAKISDRLSTYLQSERYMKQGYEVKEIAESYLPEIENMISAYPISLIKDFIEN

SEQ ID NO: 40999 - protein, 84 aa, unidentified
  REGION 1..84: note = Description of Unknown:cds_NZ_WFIY01000004.1_cds_WP_155863916.1_1828 target sequence
DEFGFGKELFVEFKEQKTIESKIAKISDRLSTYLQSERYMKQGYEVKEIAESYLPEIENMISAYPISLIKDFIENVIRSKAFKE

SEQ ID NO: 41000 - protein, 85 aa, unidentified
  REGION 1..85: note = Description of Unknown:cds_NZ_WFIY01000004.1_cds_WP_155863916.1_1828 target sequence
ETVADHSFEAAVIAYYLARKLNEKGININPDHAAVLALFHDAGESILGDLPKWTTERINKKDAEKEAFDEFGFGKELFVEFKEQK

SEQ ID NO: 41001 - protein, 85 aa, unidentified
  REGION 1..85: note = Description of Unknown:cds_NC_030656.1_cds_YP_009268730.1_15 target sequence
SPFAIAAPDFVQEIEDLLTNKEAKLFSITSRLQALLVYMNVISSDYEASNVCALVESYGTTSASKICYTNATADFLQHSLTAIIC

SEQ ID NO: 41002 - protein, 85 aa, unidentified
  REGION 1..85: note = Description of Unknown:cds_NC_030656.1_cds_YP_009268730.1_15 target sequence
LQNNGKTKIITMSNDKEKPVNSGFVITLKKGAICIIPSSYDVYVENTCKQTLKELATKYMFIPLNKKNTLVNPVTIRMNPSPLDC

SEQ ID NO: 41003 - protein, 84 aa, unidentified
  REGION 1..84: note = Description of Unknown:cds_NC_030656.1_cds_YP_009268730.1_15 target sequence
TMSNDKEKPVNSGFVITLKKGAICIIPSSYDVYVENTCKQTLKELATKYMFIPLNKKNTLVNPVTIRMNPSPLDCQSILLKMNS

SEQ ID NO: 41004 - protein, 85 aa, unidentified
  REGION 1..85: note = Description of Unknown:cds_NC_030656.1_cds_YP_009268730.1_15 target sequence
ITSRLQALLVYMNVISSDYEASNVCALVESYGTTSASKICYTNATADFLQHSLTAIICLQNNGKTKIITMSNDKEKPVNSGFVIT

SEQ ID NO: 41005 - protein, 85 aa, unidentified
  REGION 1..85: note = Description of Unknown:cds_NC_009884.1_cds_YP_001496955.1_30 target sequence
ADKITLWTDLVSELRKKLTKKEMATLQEIIDENGSIEDVIVTLVRKAVNPDLLSISDIELCMQKAIKIGAYVTATGGGSPRSNDN

SEQ ID NO: 41006 - protein, 85 aa, unidentified
  REGION 1..85: note = Description of Unknown:cds_NC_009884.1_cds_YP_001496955.1_30 target sequence
MPSQIAREVVEEAYGGSPEQQQQQNPLQNMMKQMADAISTAIMSEVSSKLKSVMPVPMPQQNSDNGSTPHIVDSSKSKDKSSNDG

SEQ ID NO: 41007 - protein, 84 aa, unidentified
  REGION 1..84: note = Description of Unknown:cds_NC_009884.1_cds_YP_001496955.1_30 target sequence
EEAYGGSPEQQQQQNPLQNMMKQMADAISTAIMSEVSSKLKSVMPVPMPQQNSDNGSTPHIVDSSKSKDKSSNDGDNGVFTGDE

SEQ ID NO: 41008 - protein, 85 aa, unidentified
  REGION 1..85: note = Description of Unknown:cds_NC_009884.1_cds_YP_001496955.1_30 target sequence
EIIDENGSIEDVIVTLVRKAVNPDLLSISDIELCMQKAIKIGAYVTATGGGSPRSNDNMPSQIAREVVEEAYGGSPEQQQQQNPL

SEQ ID NO: 41009 - protein, 85 aa, unidentified
  REGION 1..85: note = Description of Unknown:cds_NC_024711.1_cds_YP_009052561.2_86 target sequence
IKVESKFKDFGIQIPTDISEITSEALDAILTNVVIAKHYCVVALCQNESLFGVINNKVSTVEVMPIIAKISKEDAELIGMNQMDK

SEQ ID NO: 41010 - protein, 85 aa, unidentified
  REGION 1..85: note = Description of Unknown:cds_NC_024711.1_cds_YP_009052561.2_86 target sequence
IIIDRSTLERGYHLYLKHNVLSPQFVNKYITNDTELTRSITVGTFGQNQGYTKGQKVWFVEFKVIAINDLRAAITDKHKAINPFV

SEQ ID NO: 41011 - protein, 84 aa, unidentified
  REGION 1..84: note = Description of Unknown:cds_NC_024711.1_cds_YP_009052561.2_86 target sequence
RGYHLYLKHNVLSPQFVNKYITNDTELTRSITVGTFGQNQGYTKGQKVWFVEFKVIAINDLRAAITDKHKAINPFVYHSAEKAN

SEQ ID NO: 41012 - protein, 85 aa, unidentified
  REGION 1..85: note = Description of Unknown:cds_NC_024711.1_cds_YP_009052561.2_86 target sequence
AILTNVVIAKHYCVVALCQNESLFGVINNKVSTVEVMPIIAKISKEDAELIGMNQMDKIIIDRSTLERGYHLYLKHNVLSPQFVN

SEQ ID NO: 41013 - protein, 85 aa, unidentified
  REGION 1..85: note = Description of Unknown:cds_NZ_WFIY01000004.1_cds_WP_155862728.1_534 target sequence
QIIIFGLLSLLAINVVYFAVSIILVKRFKSIKYDFLGKQIELKVKEDSRVNAFSVITGKILVTSASLNLPKDELDAMIAHEMGHI

SEQ ID NO: 41014 - protein, 85 aa, unidentified
  REGION 1..85: note = Description of Unknown:cds_NZ_WFIY01000004.1_cds_WP_155862728.1_534 target sequence
KLHHHLKMLILVNLLVLLFFYTAEFSLFLFIISGISIVLIQRFISRKFEIQADKYASQLVDKGSLMNLIMKYGENKSSIFSTHPS

SEQ ID NO: 41015 - protein, 84 aa, unidentified
  REGION 1..84: note = Description of Unknown:cds_NZ_WFIY01000004.1_cds_WP_155862728.1_534 target sequence
ILVNLLVLLFFYTAEFSLFLFIISGISIVLIQRFISRKFEIQADKYASQLVDKGSLMNLIMKYGENKSSIFSTHPSSSARIKKI

SEQ ID NO: 41016 - protein, 85 aa, unidentified
  REGION 1..85: note = Description of Unknown:cds_NZ_WFIY01000004.1_cds_WP_155862728.1_534 target sequence
FKSIKYDFLGKQIELKVKEDSRVNAFSVITGKILVTSASLNLPKDELDAMIAHEMGHIKLHHHLKMLILVNLLVLLFFYTAEFSL

SEQ ID NO: 41017 - protein, 85 aa, unidentified
  REGION 1..85: note = Description of Unknown:cds_NZ_WFIY01000004.1_cds_WP_155863088.1_1001 target sequence
QSKFIADAMLGKLARWLRILGYDTYYSNDIEDWKVIKIAEKDKRVILTRDRGLCIRAKKKGLECFLIPPDYDIISILAKLSIKYG

SEQ ID NO: 41018 - protein, 85 aa, unidentified
  REGION 1..85: note = Description of Unknown:cds_NZ_WFIY01000004.1_cds_WP_155863088.1_1001 target sequence
IDLEARIEASRCSECNGILEKVGENRWRCTKCKKEYWKGKHWKTIEEILIKAKSKKEKDELSYNSRTRNRGGQNTSQDSKTSNNE

SEQ ID NO: 41019 - protein, 84 aa, unidentified
  REGION 1..84: note = Description of Unknown:cds_NZ_WFIY01000004.1_cds_WP_155863088.1_1001 target sequence
SRCSECNGILEKVGENRWRCTKCKKEYWKGKHWKTIEEILIKAKSKKEKDELSYNSRTRNRGGQNTSQDSKTSNNEKIGVTKLN

SEQ ID NO: 41020 - protein, 85 aa, unidentified
  REGION 1..85: note = Description of Unknown:cds_NZ_WFIY01000004.1_cds_WP_155863088.1_1001 target sequence
NDIEDWKVIKIAEKDKRVILTRDRGLCIRAKKKGLECFLIPPDYDIISILAKLSIKYGIDLEARIEASRCSECNGILEKVGENRW

SEQ ID NO: 41021 - protein, 85 aa, unidentified
  REGION 1..85: note = Description of Unknown:cds_NZ_WFIY01000004.1_cds_WP_155863155.1_1084 target sequence
FKVLLRALDKLQLTEKKKVAVFDDIGPLDLGFIEISLSKGSEDEIPLWLAQYLEKQNLVKINSITTEELGKLLFQEKQNSTTPAS

SEQ ID NO: 41022 - protein, 85 aa, unidentified
  REGION 1..85: note = Description of Unknown:cds_NZ_WFIY01000004.1_cds_WP_155863155.1_1084 target sequence
LVKTYPDIYFRIKKLEEELKAKGLNGLEELKKVKSMVNEISLIRLRKIIQLASLSINDQTLISKMTKEEYLAYLSMRKIITSFYG

SEQ ID NO: 41023 - protein, 84 aa, unidentified
  REGION 1..84: note = Description of Unknown:cds_NZ_WFIY01000004.1_cds_WP_155863155.1_1084 target sequence
FRIKKLEEELKAKGLNGLEELKKVKSMVNEISLIRLRKIIQLASLSINDQTLISKMTKEEYLAYLSMRKIITSFYGDVIGNPTN

SEQ ID NO: 41024 - protein, 85 aa, unidentified
  REGION 1..85: note = Description of Unknown:cds_NZ_WFIY01000004.1_cds_WP_155863155.1_1084 target sequence
LDLGFIEISLSKGSEDEIPLWLAQYLEKQNLVKINSITTEELGKLLFQEKQNSTTPASLVKTYPDIYFRIKKLEEELKAKGLNGL

SEQ ID NO: 41025 - protein, 85 aa, unidentified
  REGION 1..85: note = Description of Unknown:cds_NZ_WFIY01000004.1_cds_WP_155863371.1_1344 target sequence
SDIDIKINEYKRLIKIEPNNAWHHFHLGEALEEKGELNEAIEEYSRAVELDPTFPDFHFKKAEILLRLSKFQEAVQVYDNAIRKD

SEQ ID NO: 41026 - protein, 85 aa, unidentified
  REGION 1..85: note = Description of Unknown:cds_NZ_WFIY01000004.1_cds_WP_155863371.1_1344 target sequence
PKNAHLYHYFKGEIYEKLGKYEDALKEYNRAIEWSPNNSWYRQAKIYLLEKMNRLEDALKEIDELIKIDNSVVNLELRKEILAKL

SEQ ID NO: 41027 - protein, 84 aa, unidentified
  REGION 1..84: note = Description of Unknown:cds_NZ_WFIY01000004.1_cds_WP_155863371.1_1344 target sequence
FKGEIYEKLGKYEDALKEYNRAIEWSPNNSWYRQAKIYLLEKMNRLEDALKEIDELIKIDNSVVNLELRKEILAKLKNNNDIKV

SEQ ID NO: 41028 - protein, 85 aa, unidentified
  REGION 1..85: note = Description of Unknown:cds_NZ_WFIY01000004.1_cds_WP_155863371.1_1344 target sequence
GEALEEKGELNEAIEEYSRAVELDPTFPDFHFKKAEILLRLSKFQEAVQVYDNAIRKDPKNAHLYHYFKGEIYEKLGKYEDALKE

SEQ ID NO: 41029 - protein, 85 aa, unidentified
  REGION 1..85: note = Description of Unknown:cds_NZ_WFIY01000004.1_cds_WP_155863408.1_1386 target sequence
RQRNEEVTKEKILQAAIEVFAEEGFFKASVDQVCKKAGVSKGIIFWHFKTKDQLILEVAKKSLPLDIVESCLKEKENTLECIGNK

SEQ ID NO: 41030 - protein, 85 aa, unidentified
  REGION 1..85: note = Description of Unknown:cds_NZ_WFIY01000004.1_cds_WP_155863408.1_1386 target sequence
YLEKYDDPIMRKLFLHTISAMNIYKELGDDIRELCDSLVKKISKCVLNSESNEDIIRIRSFMGGLLCYVVNPPNIDKKTYVDTLI

SEQ ID NO: 41031 - protein, 84 aa, unidentified
  REGION 1..84: note = Description of Unknown:cds_NZ_WFIY01000004.1_cds_WP_155863408.1_1386 target sequence
MRKLFLHTISAMNIYKELGDDIRELCDSLVKKISKCVLNSESNEDIIRIRSFMGGLLCYVVNPPNIDKKTYVDTLIKIALVKET

SEQ ID NO: 41032 - protein, 85 aa, unidentified
  REGION 1..85: note = Description of Unknown:cds_NZ_WFIY01000004.1_cds_WP_155863408.1_1386 target sequence
ASVDQVCKKAGVSKGIIFWHFKTKDQLILEVAKKSLPLDIVESCLKEKENTLECIGNKYLEKYDDPIMRKLFLHTISAMNIYKEL

SEQ ID NO: 41033 - protein, 85 aa, unidentified
  REGION 1..85: note = Description of Unknown:cds_NZ_WFIY01000004.1_cds_WP_155863946.1_1864 target sequence
KILVMSNIRFPEPHIESTLSSIIKKEEPETIVLDGDTTQCYWDYECPRVIDVLYVIRSIAPWAQIIYVQGDMDPHAIKCIMAEPR

SEQ ID NO: 41034 - protein, 85 aa, unidentified
  REGION 1..85: note = Description of Unknown:cds_NZ_WFIY01000004.1_cds_WP_155863946.1_1864 target sequence
YREEIIGTTMYIADVSSVKYYILHGHQGDIDQLRRSVGAGPWDWIIVGQYKRLEMDKLARVIYIGGITREFPPEARGYLVITDSN

SEQ ID NO: 41035 - protein, 84 aa, unidentified
  REGION 1..84: note = Description of Unknown:cds_NZ_WFIY01000004.1_cds_WP_155863946.1_1864 target sequence
MYIADVSSVKYYILHGHQGDIDQLRRSVGAGPWDWIIVGQYKRLEMDKLARVIYIGGITREFPPEARGYLVITDSNHYLRSLSQ

SEQ ID NO: 41036 - protein, 85 aa, unidentified
  REGION 1..85: note = Description of Unknown:cds_NZ_WFIY01000004.1_cds_WP_155863946.1_1864 target sequence
PETIVLDGDTTQCYWDYECPRVIDVLYVIRSIAPWAQIIYVQGDMDPHAIKCIMAEPRYREEIIGTTMYIADVSSVKYYILHGHQ

SEQ ID NO: 41037 - protein, 85 aa, unidentified
  REGION 1..85: note = Description of Unknown:cds_NZ_WFIY01000004.1_cds_WP_155864028.1_1959 target sequence
PLSKDDKRKLIYAIVFSVASYAVAAGLALGTAAYALSIFTDPVVTLTVPLIIVAIGIQAINAKNGPLLILIISAILYAISGLIFL

SEQ ID NO: 41038 - protein, 85 aa, unidentified
  REGION 1..85: note = Description of Unknown:cds_NZ_WFIY01000004.1_cds_WP_155864028.1_1959 target sequence
VPTFVIAGLVVEGVSRIVGYRSFKAVMINTTLAGGLVGVFSVVFGVLFVPSTASQFALDLMLAFTGIYFVESAIMGVVSYYLGNF

SEQ ID NO: 41039 - protein, 84 aa, unidentified
  REGION 1..84: note = Description of Unknown:cds_NZ_WFIY01000004.1_cds_WP_155864028.1_1959 target sequence
VVEGVSRIVGYRSFKAVMINTTLAGGLVGVFSVVFGVLFVPSTASQFALDLMLAFTGIYFVESAIMGVVSYYLGNFLIKSGVLH

SEQ ID NO: 41040 - protein, 85 aa, unidentified
  REGION 1..85: note = Description of Unknown:cds_NZ_WFIY01000004.1_cds_WP_155864028.1_1959 target sequence
ALGTAAYALSIFTDPVVTLTVPLIIVAIGIQAINAKNGPLLILIISAILYAISGLIFLVPTFVIAGLVVEGVSRIVGYRSFKAVM

SEQ ID NO: 41041 - protein, 85 aa, unidentified
  REGION 1..85: note = Description of Unknown:cds_NZ_WFIY01000004.1_cds_WP_155864231.1_2201 target sequence
EDRHIPPIILSFPLRRFFENPYKILTPFVRRGMTVVDHGCGPGFYTIPLSYLVGKEGIVYAVDSSAKSIKVLESKLKKKGINNVK

SEQ ID NO: 41042 - protein, 85 aa, unidentified
  REGION 1..85: note = Description of Unknown:cds_NZ_WFIY01000004.1_cds_WP_155864231.1_2201 target sequence
TFVSRNLNFIPSASIDFLLSKDVLCCTVLHKELAREIERVLKPGGKALVTIRIGKRSDPRSLSAEEFFSLFTNIERKGLSRFHAW

SEQ ID NO: 41043 - protein, 84 aa, unidentified
  REGION 1..84: note = Description of Unknown:cds_NZ_WFIY01000004.1_cds_WP_155864231.1_2201 target sequence
IPSASIDFLLSKDVLCCTVLHKELAREIERVLKPGGKALVTIRIGKRSDPRSLSAEEFFSLFTNIERKGLSRFHAWVILSGEKK

SEQ ID NO: 41044 - protein, 85 aa, unidentified
  REGION 1..85: note = Description of Unknown:cds_NZ_WFIY01000004.1_cds_WP_155864231.1_2201 target sequence
FVRRGMTVVDHGCGPGFYTIPLSYLVGKEGIVYAVDSSAKSIKVLESKLKKKGINNVKTFVSRNLNFIPSASIDFLLSKDVLCCT

SEQ ID NO: 41045 - protein, 85 aa, unidentified
  REGION 1..85: note = Description of Unknown:cds_NC_035460.1_cds_YP_009408011.1_60 target sequence
DPATFLKYYAPKGSIIFINYIFSLTEIFNPSEIKHAAIYYGNNHNTINILNNNNDDDYVAVEATFKNGVRCVPLSELLSEAVNVK

SEQ ID NO: 41046 - protein, 85 aa, unidentified
  REGION 1..85: note = Description of Unknown:cds_NC_035460.1_cds_YP_009408011.1_60 target sequence
VYSLKGNLSTERMTFAAEYAFKYLGIPYGFGSKSLYCFKLVADCYNAVHVNIPTYNILGKHIVLSQSFTKNNDWKKIYDSSNFMV

SEQ ID NO: 41047 - protein, 84 aa, unidentified
  REGION 1..84: note = Description of Unknown:cds_NC_035460.1_cds_YP_009408011.1_60 target sequence
TERMTFAAEYAFKYLGIPYGFGSKSLYCFKLVADCYNAVHVNIPTYNILGKHIVLSQSFTKNNDWKKIYDSSNFMVNALSLMNR

SEQ ID NO: 41048 - protein, 85 aa, unidentified
  REGION 1..85: note = Description of Unknown:cds_NC_035460.1_cds_YP_009408011.1_60 target sequence
FNPSEIKHAAIYYGNNHNTINILNNNNDDDYVAVEATFKNGVRCVPLSELLSEAVNVKVYSLKGNLSTERMTFAAEYAFKYLGIP

SEQ ID NO: 41049 - protein, 85 aa, unidentified
  REGION 1..85: note = Description of Unknown:cds_NZ_WFIY01000004.1_cds_WP_155862898.1_747 target sequence
SQETVQVKKENPMRRIKIAKVTVNIGLGESGERLEKAYHLLEELTGAKPVYTRAKKSIKEFGIRKGQLIGVKVTLRGQKGIEFLK

SEQ ID NO: 41050 - protein, 85 aa, unidentified
  REGION 1..85: note = Description of Unknown:cds_NZ_WFIY01000004.1_cds_WP_155862898.1_747 target sequence
RVLQAVGYKLKAESFDDYGNVSFGIAEHVIIPGTKYDPEVGVFGMDIAITLERPGYRVARRKRKTARIPKRHRISKEEAIKFLTE

SEQ ID NO: 41051 - protein, 84 aa, unidentified
  REGION 1..84: note = Description of Unknown:cds_NZ_WFIY01000004.1_cds_WP_155862898.1_747 target sequence
KLKAESFDDYGNVSFGIAEHVIIPGTKYDPEVGVFGMDIAITLERPGYRVARRKRKTARIPKRHRISKEEAIKFLTETLGIVVV

SEQ ID NO: 41052 - protein, 85 aa, unidentified
  REGION 1..85: note = Description of Unknown:cds_NZ_WFIY01000004.1_cds_WP_155862898.1_747 target sequence
GESGERLEKAYHLLEELTGAKPVYTRAKKSIKEFGIRKGQLIGVKVTLRGQKGIEFLKRVLQAVGYKLKAESFDDYGNVSFGIAE

SEQ ID NO: 41053 - protein, 85 aa, unidentified
  REGION 1..85: note = Description of Unknown:cds_NZ_WFIY01000004.1_cds_WP_013775611.1_796 target sequence
LTSNVDELILNLAKSLLGEEYTELLEFLLNKKTEMTDDEIANELGIKVNEIRKKLYALADQGLVSYRKSRDKDTGWYIYYWKVNT

SEQ ID NO: 41054 - protein, 85 aa, unidentified
  REGION 1..85: note = Description of Unknown:cds_NZ_WFIY01000004.1_cds_WP_013775611.1_796 target sequence
EQINEILLNRKREILEKLKARLEYESNNEFYMCPEDKSKYTFDEAFENEFKCPKCGSQLIYYDSSKVRQVLEKKINELQEEIDKE

SEQ ID NO: 41055 - protein, 84 aa, unidentified
  REGION 1..84: note = Description of Unknown:cds_NZ_WFIY01000004.1_cds_WP_013775611.1_796 target sequence
RKREILEKLKARLEYESNNEFYMCPEDKSKYTFDEAFENEFKCPKCGSQLIYYDSSKVRQVLEKKINELQEEIDKETKLGAKSS

SEQ ID NO: 41056 - protein, 85 aa, unidentified
  REGION 1..85: note = Description of Unknown:cds_NZ_WFIY01000004.1_cds_WP_013775611.1_796 target sequence
LLNKKTEMTDDEIANELGIKVNEIRKKLYALADQGLVSYRKSRDKDTGWYIYYWKVNTEQINEILLNRKREILEKLKARLEYESN

SEQ ID NO: 41057 - protein, 85 aa, unidentified
  REGION 1..85: note = Description of Unknown:cds_NZ_WFIY01000004.1_cds_WP_155863042.1_936 target sequence
IQGKIGDLELKVVDIKQTHIKELFYFKLYLGDKLVGYCNYFSGRDYYPDWLEIDYYPWLRDVGLEEEFFKKIYNFLSKRGRLFVT

SEQ ID NO: 41058 - protein, 85 aa, unidentified
  REGION 1..85: note = Description of Unknown:cds_NZ_WFIY01000004.1_cds_WP_155863042.1_936 target sequence
YDKDKETLDMIMKGYSAVDTPLGFSLLKAGFTWFKVWYFPEGGNEGSPKIQANKPLNESVALKELEELLEDVKNEKVKDWINAKR

SEQ ID NO: 41059 - protein, 84 aa, unidentified
  REGION 1..84: note = Description of Unknown:cds_NZ_WFIY01000004.1_cds_WP_155863042.1_936 target sequence
DMIMKGYSAVDTPLGFSLLKAGFTWFKVWYFPEGGNEGSPKIQANKPLNESVALKELEELLEDVKNEKVKDWINAKRKSRNFIV

SEQ ID NO: 41060 - protein, 85 aa, unidentified
  REGION 1..85: note = Description of Unknown:cds_NZ_WFIY01000004.1_cds_WP_155863042.1_936 target sequence
LYLGDKLVGYCNYFSGRDYYPDWLEIDYYPWLRDVGLEEEFFKKIYNFLSKRGRLFVTYDKDKETLDMIMKGYSAVDTPLGFSLL

SEQ ID NO: 41061 - protein, 85 aa, unidentified
  REGION 1..85: note = Description of Unknown:cds_NZ_WFIY01000004.1_cds_WP_155863728.1_1593 target sequence
SSHKQHRELAPKVLNFFVITISTSRYEKMQKKEPIVDESGDIIKQEIITSGHKLVGYSLVPDDKVKILKAFTEALDNPEVDVIVS

SEQ ID NO: 41062 - protein, 85 aa, unidentified
  REGION 1..85: note = Description of Unknown:cds_NZ_WFIY01000004.1_cds_WP_155863728.1_1593 target sequence
TGGTGYSKTDVTVETLRGIFDREVEGFGEVFRFLSYEDPQVRSAAYLSKATAGIIKDKVIYALPGSPDAVKLAMEKLILPEAPHL

SEQ ID NO: 41063 - protein, 84 aa, unidentified
  REGION 1..84: note = Description of Unknown:cds_NZ_WFIY01000004.1_cds_WP_155863728.1_1593 target sequence
TDVTVETLRGIFDREVEGFGEVFRFLSYEDPQVRSAAYLSKATAGIIKDKVIYALPGSPDAVKLAMEKLILPEAPHLVFIARSK

SEQ ID NO: 41064 - protein, 85 aa, unidentified
  REGION 1..85: note = Description of Unknown:cds_NZ_WFIY01000004.1_cds_WP_155863728.1_1593 target sequence
KMQKKEPIVDESGDIIKQEIITSGHKLVGYSLVPDDKVKILKAFTEALDNPEVDVIVSTGGTGYSKTDVTVETLRGIFDREVEGF

SEQ ID NO: 41065 - protein, 85 aa, unidentified
  REGION 1..85: note = Description of Unknown:cds_NZ_WFIY01000004.1_cds_WP_155863984.1_1908 target sequence
VKLVATLGTSPGGVFETYMNLKSGNYGGEPVNIKEVYIIRTSDKAVELAWKLVKAIFVCCGGNEVEIVDIPLPINDITTKEDYEI

SEQ ID NO: 41066 - protein, 85 aa, unidentified
  REGION 1..85: note = Description of Unknown:cds_NZ_WFIY01000004.1_cds_WP_155863984.1_1908 target sequence
FRKGLQGKISKGDYVDFTGGRKAMSVAAAITAIRNSAYVVTTIISQSEYNRIQNLIKQFNEEEIEEAGKGKCDNKGKFCELISKE

SEQ ID NO: 41067 - protein, 84 aa, unidentified
  REGION 1..84: note = Description of Unknown:cds_NZ_WFIY01000004.1_cds_WP_155863984.1_1908 target sequence
ISKGDYVDFTGGRKAMSVAAAITAIRNSAYVVTTIISQSEYNRIQNLIKQFNEEEIEEAGKGKCDNKGKFCELISKEARTILLA

SEQ ID NO: 41068 - protein, 85 aa, unidentified
  REGION 1..85: note = Description of Unknown:cds_NZ_WFIY01000004.1_cds_WP_155863984.1_1908 target sequence
GEPVNIKEVYIIRTSDKAVELAWKLVKAIFVCCGGNEVEIVDIPLPINDITTKEDYEIFRKGLQGKISKGDYVDFTGGRKAMSVA

SEQ ID NO: 41069 - protein, 85 aa, unidentified
  REGION 1..85: note = Description of Unknown:cds_NZ_WFIY01000004.1_cds_WP_155864147.1_2101 target sequence
SAKHRDWEKIWFGVMLILVIIFVAWSYESILTGSTATYRYGLPLKCGLPSKLPNGTLVIYMLAVQWAWIPQNVSEIIYLPNGTVQ

SEQ ID NO: 41070 - protein, 85 aa, unidentified
  REGION 1..85: note = Description of Unknown:cds_NZ_WFIY01000004.1_cds_WP_155864147.1_2101 target sequence
QVLITDAIMYVDGFPYIKVYPKQPIELILYSNNVVHAFYIQLPHGDQNWNIVPGIDSYAFFYAPATPGNYSFHCAEYCGVGHSYM

SEQ ID NO: 41071 - protein, 84 aa, unidentified
  REGION 1..84: note = Description of Unknown:cds_NZ_WFIY01000004.1_cds_WP_155864147.1_2101 target sequence
MYVDGFPYIKVYPKQPIELILYSNNVVHAFYIQLPHGDQNWNIVPGIDSYAFFYAPATPGNYSFHCAEYCGVGHSYMYGYFDVQ

SEQ ID NO: 41072 - protein, 85 aa, unidentified
  REGION 1..85: note = Description of Unknown:cds_NZ_WFIY01000004.1_cds_WP_155864147.1_2101 target sequence
ESILTGSTATYRYGLPLKCGLPSKLPNGTLVIYMLAVQWAWIPQNVSEIIYLPNGTVQQVLITDAIMYVDGFPYIKVYPKQPIEL

SEQ ID NO: 41073 - protein, 85 aa, unidentified
  REGION 1..85: note = Description of Unknown:cds_NZ_WFIY01000004.1_cds_WP_013776494.1_2231 target sequence
SYDPIIKQYSNVIKGLKIEECLADELFEEMKVNNEIVKIEGCNRPVIKVEKEGRRFFTYYGVPEINELWPFLNALVRISSNTVHL

SEQ ID NO: 41074 - protein, 85 aa, unidentified
  REGION 1..85: note = Description of Unknown:cds_NZ_WFIY01000004.1_cds_WP_013776494.1_2231 target sequence
QADEMELAKKLKGNLKLFVTATCTHCPAVAELFYQISIVNESVNLEIYDVDVYEEYIDKYHVLSTPKIVYNEKEFPSFPPLILLK

SEQ ID NO: 41075 - protein, 84 aa, unidentified
  REGION 1..84: note = Description of Unknown:cds_NZ_WFIY01000004.1_cds_WP_013776494.1_2231 target sequence
KKLKGNLKLFVTATCTHCPAVAELFYQISIVNESVNLEIYDVDVYEEYIDKYHVLSTPKIVYNEKEFPSFPPLILLKMLAKSTQ

SEQ ID NO: 41076 - protein, 85 aa, unidentified
  REGION 1..85: note = Description of Unknown:cds_NZ_WFIY01000004.1_cds_WP_013776494.1_2231 target sequence
EEMKVNNEIVKIEGCNRPVIKVEKEGRRFFTYYGVPEINELWPFLNALVRISSNTVHLQADEMELAKKLKGNLKLFVTATCTHCP

SEQ ID NO: 41077 - protein, 85 aa, unidentified
  REGION 1..85: note = Description of Unknown:cds_NZ_WFIY01000004.1_cds_WP_155864282.1_2275 target sequence
CDYRIITTDRPVKDSGKAIIVSRETFNKLTSDIYLKVMASDDKEKLGLSKSYYYYILDSMKKLGLIEDNALAFKLIMPFVKGEKE

SEQ ID NO: 41078 - protein, 85 aa, unidentified
  REGION 1..85: note = Description of Unknown:cds_NZ_WFIY01000004.1_cds_WP_155864282.1_2275 target sequence
LKFDDGIIYLNGKQIISIDMSSSKYACPTCPVFAECVYGIKRIAMSMKIKTQSIDSEIEARNERLPSKLWYSLIRGIVAKVLPKL

SEQ ID NO: 41079 - protein, 84 aa, unidentified
  REGION 1..84: note = Description of Unknown:cds_NZ_WFIY01000004.1_cds_WP_155864282.1_2275 target sequence
YLNGKQIISIDMSSSKYACPTCPVFAECVYGIKRIAMSMKIKTQSIDSEIEARNERLPSKLWYSLIRGIVAKVLPKLDSINVYY

SEQ ID NO: 41080 - protein, 85 aa, unidentified
  REGION 1..85: note = Description of Unknown:cds_NZ_WFIY01000004.1_cds_WP_155864282.1_2275 target sequence
KLTSDIYLKVMASDDKEKLGLSKSYYYYILDSMKKLGLIEDNALAFKLIMPFVKGEKELKFDDGIIYLNGKQIISIDMSSSKYAC

SEQ ID NO: 41081 - protein, 85 aa, unidentified
  REGION 1..85: note = Description of Unknown:cds_NZ_WFIY01000004.1_cds_2345 target sequence
PPSSGQLYEEREPSSTPAMPEEGVYEVKFSNRRTNVVRLLPNGFQERKLRKLANLSAKLFNEVNYERRQQFFHEGKVDFKGTWNK

SEQ ID NO: 41082 - protein, 85 aa, unidentified
  REGION 1..85: note = Description of Unknown:cds_NZ_WFIY01000004.1_cds_2345 target sequence
YYEKYKDKLGVNAQAILQKNNEDWSSFFSLLKLKKEGKLPHINHVSPPRYWKDRETKKGKLILVVRQDRYEVENHKLILKDFDME

SEQ ID NO: 41083 - protein, 85 aa, unidentified
  REGION 1..85: note = Description of Unknown:cds_NZ_WFIY01000004.1_cds_2345 target sequence
LGVNAQAILQKNNEDWSSFFSLLKLKKEGKLPHINHVSPPRYWKDRETKKGKLILVVRQDRYEVENHKLILKDFDMEIDFVGRLR

SEQ ID NO: 41084 - protein, 85 aa, unidentified
  REGION 1..85: note = Description of Unknown:cds_NZ_WFIY01000004.1_cds_2345 target sequence
KFSNRRTNVVRLLPNGFQERKLRKLANLSAKLFNEVNYERRQQFFHEGKVDFKGTWNKYYEKYKDKLGVNAQAILQKNNEDWSSF

SEQ ID NO: 41085 - protein, 85 aa, unidentified
  REGION 1..85: note = Description of Unknown:cds_NC_003214.2_cds_NP_445699.1_34 target sequence
QKVRLQGSVAYVFKVFTESLKKMEIDPVAGAINEKTALVAVKYKHFAEKITADINKELWNMKIKDGKLFLVGMKELVDEDLREVN

SEQ ID NO: 41086 - protein, 85 aa, unidentified
  REGION 1..85: note = Description of Unknown:cds_NC_003214.2_cds_NP_445699.1_34 target sequence
SKILSKLKKFGIDAGAYVTDDGDAVIMVSLNDVIIRILEKTLQETKVRAGNHMRNLRVKFGNDDKYAYTVIYSRNSKNESVVKDV

SEQ ID NO: 41087 - protein, 84 aa, unidentified
  REGION 1..84: note = Description of Unknown:cds_NC_003214.2_cds_NP_445699.1_34 target sequence
KFGIDAGAYVTDDGDAVIMVSLNDVIIRILEKTLQETKVRAGNHMRNLRVKFGNDDKYAYTVIYSRNSKNESVVKDVEEVLKDE

SEQ ID NO: 41088 - protein, 85 aa, unidentified
  REGION 1..85: note = Description of Unknown:cds_NC_003214.2_cds_NP_445699.1_34 target sequence
VAGAINEKTALVAVKYKHFAEKITADINKELWNMKIKDGKLFLVGMKELVDEDLREVNSKILSKLKKFGIDAGAYVTDDGDAVIM

SEQ ID NO: 41089 - protein, 85 aa, unidentified
  REGION 1..85: note = Description of Unknown:cds_NC_003214.2_cds_YP_001504371.1_73 target sequence
PSLLSLLRHGIHSSIFDIHFSPDRFKFLCPSFGLYLFITLRKSSFEIDYNNGLIYIEYNVPEPLSNKYLLTYDISCAGNKCFKHA

SEQ ID NO: 41090 - protein, 85 aa, unidentified
  REGION 1..85: note = Description of Unknown:cds_NC_003214.2_cds_YP_001504371.1_73 target sequence
EIFYNLYSDLFKQYVYPTLSSIKASKIHVKECSKYLIESNLVKLVSYPYLDFFVHDVLHFRVVTSMFNEFKKFDCAYPRRYITRF

SEQ ID NO: 41091 - protein, 84 aa, unidentified
  REGION 1..84: note = Description of Unknown:cds_NC_003214.2_cds_YP_001504371.1_73 target sequence
DLFKQYVYPTLSSIKASKIHVKECSKYLIESNLVKLVSYPYLDFFVHDVLHFRVVTSMFNEFKKFDCAYPRRYITRFVKYAKKI

SEQ ID NO: 41092 - protein, 85 aa, unidentified
  REGION 1..85: note = Description of Unknown:cds_NC_003214.2_cds_YP_001504371.1_73 target sequence
LCPSFGLYLFITLRKSSFEIDYNNGLIYIEYNVPEPLSNKYLLTYDISCAGNKCFKHAEIFYNLYSDLFKQYVYPTLSSIKASKI

SEQ ID NO: 41093 - protein, 85 aa, unidentified
  REGION 1..85: note = Description of Unknown:cds_NC_030656.1_cds_YP_009268843.1_128 target sequence
TVTVADELPFYSPNQHKPRPMSLFKSKKLASILSICLRAGLILCLIVLMALVVYLSYELNECRNRETKCNITAKLLQMNLTTEKS

SEQ ID NO: 41094 - protein, 85 aa, unidentified
  REGION 1..85: note = Description of Unknown:cds_NC_030656.1_cds_YP_009268843.1_128 target sequence
IMCMPVTPSISSASSTTEPSTLSASASLPPTTTTTPTTTTTTTPTTTTTTTPTTTTTPTTTPTTTPTTTKNKEDKEKQQQQLENL

SEQ ID NO: 41095 - protein, 84 aa, unidentified
  REGION 1..84: note = Description of Unknown:cds_NC_030656.1_cds_YP_009268843.1_128 target sequence
SISSASSTTEPSTLSASASLPPTTTTTPTTTTTTTPTTTTTTTPTTTTTPTTTPTTTPTTTKNKEDKEKQQQQLENLKEKIKSN

SEQ ID NO: 41096 - protein, 85 aa, unidentified
  REGION 1..85: note = Description of Unknown:cds_NC_030656.1_cds_YP_009268843.1_128 target sequence
KLASILSICLRAGLILCLIVLMALVVYLSYELNECRNRETKCNITAKLLQMNLTTEKSIMCMPVTPSISSASSTTEPSTLSASAS

SEQ ID NO: 41097 - protein, 85 aa, unidentified
  REGION 1..85: note = Description of Unknown:cds_NC_030656.1_cds_YP_009268853.1_138 target sequence
HSKLSVAVVSVFLIYTYTYATTFLVGPNEQIKNQTIGKRVYHNICVPPNNTFPINVTCYSKVESTSNFDSIFWLNCDDTNLTTRG

SEQ ID NO: 41098 - protein, 85 aa, unidentified
  REGION 1..85: note = Description of Unknown:cds_NC_030656.1_cds_YP_009268853.1_138 target sequence
CTFPNKECCTSNYKRINHTMYLNSTWDHEIRNTLIVRNDTNLKSILKCVYQGVNVFVSMFNITKFINEGDRQGHKVCNRYNKTQY

SEQ ID NO: 41099 - protein, 84 aa, unidentified
  REGION 1..84: note = Description of Unknown:cds_NC_030656.1_cds_YP_009268853.1_138 target sequence
CTSNYKRINHTMYLNSTWDHEIRNTLIVRNDTNLKSILKCVYQGVNVFVSMFNITKFINEGDRQGHKVCNRYNKTQYNYIYNFF

SEQ ID NO: 41100 - protein, 85 aa, unidentified
  REGION 1..85: note = Description of Unknown:cds_NC_030656.1_cds_YP_009268853.1_138 target sequence
NEQIKNQTIGKRVYHNICVPPNNTFPINVTCYSKVESTSNFDSIFWLNCDDTNLTTRGCTFPNKECCTSNYKRINHTMYLNSTWD

SEQ ID NO: 41101 - protein, 85 aa, unidentified
  REGION 1..85: note = Description of Unknown:cds_NC_009884.1_cds_YP_001496935.1_10 target sequence
TDINYYVDLLKRNLPKYKKLKVNTLSESEAKEVVAKLLADGFGVELQSGNTFVLKSSSIPPVGVSDNTNKTTAKDNVSDKSSENE

SEQ ID NO: 41102 - protein, 85 aa, unidentified
  REGION 1..85: note = Description of Unknown:cds_NC_009884.1_cds_YP_001496935.1_10 target sequence
VAQPKQVTPPVDATGNTNKTAVTSMRVSIRLPAQVADALLSVYNEPNLSNAIRKAIKDALSAKGISVQFPAPVTTTTAKKSIPSI

SEQ ID NO: 41103 - protein, 84 aa, unidentified
  REGION 1..84: note = Description of Unknown:cds_NC_009884.1_cds_YP_001496935.1_10 target sequence
PPVDATGNTNKTAVTSMRVSIRLPAQVADALLSVYNEPNLSNAIRKAIKDALSAKGISVQFPAPVTTTTAKKSIPSIDEVFRND

SEQ ID NO: 41104 - protein, 85 aa, unidentified
  REGION 1..85: note = Description of Unknown:cds_NC_009884.1_cds_YP_001496935.1_10 target sequence
SEAKEVVAKLLADGFGVELQSGNTFVLKSSSIPPVGVSDNTNKTTAKDNVSDKSSENEVAQPKQVTPPVDATGNTNKTAVTSMRV

SEQ ID NO: 41105 - protein, 85 aa, unidentified
  REGION 1..85: note = Description of Unknown:cds_NC_024711.1_cds_YP_009052547.1_70 target sequence
ELIQNAFEQGLIPGIVIVIYLIINKIIDNNKRNPLDDIAKLLNIVTRDIIEKDREKSKAVISITMVNAASECAKFVASTIITNNV

SEQ ID NO: 41106 - protein, 85 aa, unidentified
  REGION 1..85: note = Description of Unknown:cds_NC_024711.1_cds_YP_009052547.1_70 target sequence
DNNRDQIEYNARHLVNSVYYDAYSKLNMYRGDEDYLSHYMKEEWKEDIYGDIINIVYNKNLDSNKRILAFNKRIDIRVNDYTAYI

SEQ ID NO: 41107 - protein, 84 aa, unidentified
  REGION 1..84: note = Description of Unknown:cds_NC_024711.1_cds_YP_009052547.1_70 target sequence
EYNARHLVNSVYYDAYSKLNMYRGDEDYLSHYMKEEWKEDIYGDIINIVYNKNLDSNKRILAFNKRIDIRVNDYTAYIINKAFK

SEQ ID NO: 41108 - protein, 85 aa, unidentified
  REGION 1..85: note = Description of Unknown:cds_NC_024711.1_cds_YP_009052547.1_70 target sequence
DNNKRNPLDDIAKLLNIVTRDIIEKDREKSKAVISITMVNAASECAKFVASTIITNNVDNNRDQIEYNARHLVNSVYYDAYSKLN

SEQ ID NO: 41109 - protein, 85 aa, unidentified
  REGION 1..85: note = Description of Unknown:cds_NC_025351.1_cds_YP_009094083.1_3 target sequence
ASLLSILYRKIRKNYSILTEDPPSESHPQVSGLKSGRNLFERSLLDLNKFKGEDLRLRSQAIMEIEAILPILIREAESQDNSKKG

SEQ ID NO: 41110 - protein, 85 aa, unidentified
  REGION 1..85: note = Description of Unknown:cds_NC_025351.1_cds_YP_009094083.1_3 target sequence
IKNGGHKIQNYNWTQWLYTISSMTREGRIPTMENMTAALKNGIISEKEHDRISTIISLLMNYCPAYNHLLRTMSSRMKVHQCQIC

SEQ ID NO: 41111 - protein, 84 aa, unidentified
  REGION 1..84: note = Description of Unknown:cds_NC_025351.1_cds_YP_009094083.1_3 target sequence
IQNYNWTQWLYTISSMTREGRIPTMENMTAALKNGIISEKEHDRISTIISLLMNYCPAYNHLLRTMSSRMKVHQCQICMLQEIN

SEQ ID NO: 41112 - protein, 85 aa, unidentified
  REGION 1..85: note = Description of Unknown:cds_NC_025351.1_cds_YP_009094083.1_3 target sequence
PQVSGLKSGRNLFERSLLDLNKFKGEDLRLRSQAIMEIEAILPILIREAESQDNSKKGIKNGGHKIQNYNWTQWLYTISSMTREG

SEQ ID NO: 41113 - protein, 85 aa, unidentified
  REGION 1..85: note = Description of Unknown:cds_NZ_WFIY01000004.1_cds_WP_155862759.1_572 target sequence
VSTNSPFSFSGITGRIKIRGEFRRKIKLYFSCGSITSHVEYNLPKSIDELFKITQEIEKDAEEKLREVINNCELISLCETISGKT

SEQ ID NO: 41114 - protein, 85 aa, unidentified
  REGION 1..85: note = Description of Unknown:cds_NZ_WFIY01000004.1_cds_WP_155862759.1_572 target sequence
KVHVIKGKTLNLNDELKEEISFALFKHYGGKKVFFNLSEEEGIHVINVIKNDKNKVYIQLFSPNQWKFWYISEDYVIDEDLYAVM

SEQ ID NO: 41115 - protein, 84 aa, unidentified
  REGION 1..84: note = Description of Unknown:cds_NZ_WFIY01000004.1_cds_WP_155862759.1_572 target sequence
TLNLNDELKEEISFALFKHYGGKKVFFNLSEEEGIHVINVIKNDKNKVYIQLFSPNQWKFWYISEDYVIDEDLYAVMKKIHNSS

SEQ ID NO: 41116 - protein, 85 aa, unidentified
  REGION 1..85: note = Description of Unknown:cds_NZ_WFIY01000004.1_cds_WP_155862759.1_572 target sequence
LYFSCGSITSHVEYNLPKSIDELFKITQEIEKDAEEKLREVINNCELISLCETISGKTKVHVIKGKTLNLNDELKEEISFALFKH

SEQ ID NO: 41117 - protein, 85 aa, unidentified
  REGION 1..85: note = Description of Unknown:cds_NZ_WFIY01000004.1_cds_WP_155863344.1_1312 target sequence
DKFVTHLLNPERRKIEDPEKFLPSLIHGVVAELGCGPGYYCQFLVKYAEKVYCVDRNKELLDIARELAKGAIFLNEDACKTSIPS

SEQ ID NO: 41118 - protein, 85 aa, unidentified
  REGION 1..85: note = Description of Unknown:cds_NZ_WFIY01000004.1_cds_WP_155863344.1_1312 target sequence
SSVDQVLFANSFHDMRDKKKVYEEVKRILKPGGEIIIIDWKKDANFGPPKSVRMSKEDYVNFFSQDFELEKEFEVGPYHFGLVLK

SEQ ID NO: 41119 - protein, 84 aa, unidentified
  REGION 1..84: note = Description of Unknown:cds_NZ_WFIY01000004.1_cds_WP_155863344.1_1312 target sequence
FANSFHDMRDKKKVYEEVKRILKPGGEIIIIDWKKDANFGPPKSVRMSKEDYVNFFSQDFELEKEFEVGPYHFGLVLKRKSDKK

SEQ ID NO: 41120 - protein, 85 aa, unidentified
  REGION 1..85: note = Description of Unknown:cds_NZ_WFIY01000004.1_cds_WP_155863344.1_1312 target sequence
GVVAELGCGPGYYCQFLVKYAEKVYCVDRNKELLDIARELAKGAIFLNEDACKTSIPSSSVDQVLFANSFHDMRDKKKVYEEVKR

SEQ ID NO: 41121 - protein, 85 aa, unidentified
  REGION 1..85: note = Description of Unknown:cds_NZ_WFIY01000004.1_cds_WP_155863928.1_1842 target sequence
FISVPDEKINIVKSLIPKLKELSGVEITYDENTKTFNVDSSQNPYEAMKVISVIRAIGLGFSVDESLKLLSDDYMLDVIDLKQSV

SEQ ID NO: 41122 - protein, 85 aa, unidentified
  REGION 1..85: note = Description of Unknown:cds_NZ_WFIY01000004.1_cds_WP_155863928.1_1842 target sequence
GSNPETLRRIKGRIIGENGKAKKIIQEYTGVSISITDHFVAIIGIYDQVQIARKAIELLIEGKEHSTVYKYLDKAEAELVYLSKN

SEQ ID NO: 41123 - protein, 84 aa, unidentified
  REGION 1..84: note = Description of Unknown:cds_NZ_WFIY01000004.1_cds_WP_155863928.1_1842 target sequence
RRIKGRIIGENGKAKKIIQEYTGVSISITDHFVAIIGIYDQVQIARKAIELLIEGKEHSTVYKYLDKAEAELVYLSKNRPYNLK

SEQ ID NO: 41124 - protein, 85 aa, unidentified
  REGION 1..85: note = Description of Unknown:cds_NZ_WFIY01000004.1_cds_WP_155863928.1_1842 target sequence
TYDENTKTFNVDSSQNPYEAMKVISVIRAIGLGFSVDESLKLLSDDYMLDVIDLKQSVGSNPETLRRIKGRIIGENGKAKKIIQE

SEQ ID NO: 41125 - protein, 85 aa, unidentified
  REGION 1..85: note = Description of Unknown:cds_NZ_WFIY01000004.1_cds_WP_155864081.1_2021 target sequence
IKVFHLRRTYLTLTSALYPEGINFINKIKVLFVNKNYCKNAFEDVEKLREGNTIIFITAAKNYEFKQTSWGELFISAGVGESGEN

SEQ ID NO: 41126 - protein, 85 aa, unidentified
  REGION 1..85: note = Description of Unknown:cds_NZ_WFIY01000004.1_cds_WP_155864081.1_2021 target sequence
AGCTINISAFVNYPLNLNGLVDLVRSITEAKSGALRDLNFLFTGTASDAIAVGTIGGNEYFAGPSSEIGKKVTKDVREVLRKLLI

SEQ ID NO: 41127 - protein, 84 aa, unidentified
  REGION 1..84: note = Description of Unknown:cds_NZ_WFIY01000004.1_cds_WP_155864081.1_2021 target sequence
SAFVNYPLNLNGLVDLVRSITEAKSGALRDLNFLFTGTASDAIAVGTIGGNEYFAGPSSEIGKKVTKDVREVLRKLLIKDLNSE

SEQ ID NO: 41128 - protein, 85 aa, unidentified
  REGION 1..85: note = Description of Unknown:cds_NZ_WFIY01000004.1_cds_WP_155864081.1_2021 target sequence
IKVLFVNKNYCKNAFEDVEKLREGNTIIFITAAKNYEFKQTSWGELFISAGVGESGENAGCTINISAFVNYPLNLNGLVDLVRSI

SEQ ID NO: 41129 - protein, 85 aa, unidentified
  REGION 1..85: note = Description of Unknown:cds_NZ_WFIY01000004.1_cds_WP_155864104.1_2052 target sequence
NFLYIGESLGIAVVQIVVGVALALFSITLSLNLLDKLTSNLDQIAELKKGNIAVGIYVAGILVAVASVIGQGASGIARAFLGGKC

SEQ ID NO: 41130 - protein, 85 aa, unidentified
  REGION 1..85: note = Description of Unknown:cds_NZ_WFIY01000004.1_cds_WP_155864104.1_2052 target sequence
AIADLIGGLIQLFIGLPLAIFSITLAQREIYRFFAHRMSGKMETFYINNELKNGNIAIAAMLFGAFYATSAVISQAVSFLSQPIV

SEQ ID NO: 41131 - protein, 84 aa, unidentified
  REGION 1..84: note = Description of Unknown:cds_NZ_WFIY01000004.1_cds_WP_155864104.1_2052 target sequence
GLIQLFIGLPLAIFSITLAQREIYRFFAHRMSGKMETFYINNELKNGNIAIAAMLFGAFYATSAVISQAVSFLSQPIVAALSQI

SEQ ID NO: 41132 - protein, 85 aa, unidentified
  REGION 1..85: note = Description of Unknown:cds_NZ_WFIY01000004.1_cds_WP_155864104.1_2052 target sequence
TLSLNLLDKLTSNLDQIAELKKGNIAVGIYVAGILVAVASVIGQGASGIARAFLGGKCAIADLIGGLIQLFIGLPLAIFSITLAQ

SEQ ID NO: 41133 - protein, 85 aa, unidentified
  REGION 1..85: note = Description of Unknown:cds_NC_030656.1_cds_YP_009268845.1_130 target sequence
PGFNNVLTPLGLICCDRYDSFQQMLHDLGISSITSSIGDYWIAPIHATPTHISAIPSLDISRCYVSIHGKLLHAYDVLRRGYSID

SEQ ID NO: 41134 - protein, 85 aa, unidentified
  REGION 1..85: note = Description of Unknown:cds_NC_030656.1_cds_YP_009268845.1_130 target sequence
KLYLIYETTTRAHILCCNNYDQIYINDRSFGLKLESFKDYVDSREIDVLELYDNGNYDIILSPSLSLLSSLKSKCNICLASGSWI

SEQ ID NO: 41135 - protein, 84 aa, unidentified
  REGION 1..84: note = Description of Unknown:cds_NC_030656.1_cds_YP_009268845.1_130 target sequence
TTTRAHILCCNNYDQIYINDRSFGLKLESFKDYVDSREIDVLELYDNGNYDIILSPSLSLLSSLKSKCNICLASGSWIIASTNS

SEQ ID NO: 41136 - protein, 85 aa, unidentified
  REGION 1..85: note = Description of Unknown:cds_NC_030656.1_cds_YP_009268845.1_130 target sequence
LGISSITSSIGDYWIAPIHATPTHISAIPSLDISRCYVSIHGKLLHAYDVLRRGYSIDKLYLIYETTTRAHILCCNNYDQIYIND

SEQ ID NO: 41137 - protein, 85 aa, unidentified
  REGION 1..85: note = Description of Unknown:cds_NC_030656.1_cds_YP_009268857.1_142 target sequence
AGHLSLTLISCVLFHCVTYVSLVKTEDRMHSSVCVVSYPSDISNSLTVRVQAKLLAVNSFDFIYWKECGSLTNPKECTFPNDNKC

SEQ ID NO: 41138 - protein, 85 aa, unidentified
  REGION 1..85: note = Description of Unknown:cds_NC_030656.1_cds_YP_009268857.1_142 target sequence
AGKIFRENNRGYYTTAFTYHHSLTSDLTIFDVDNAAPVYVARYIGFDGIVEHVIDVLQILNERGSVVDCVEETSETFWLYEHLKR

SEQ ID NO: 41139 - protein, 84 aa, unidentified
  REGION 1..84: note = Description of Unknown:cds_NC_030656.1_cds_YP_009268857.1_142 target sequence
NNRGYYTTAFTYHHSLTSDLTIFDVDNAAPVYVARYIGFDGIVEHVIDVLQILNERGSVVDCVEETSETFWLYEHLKREKRTEL

SEQ ID NO: 41140 - protein, 85 aa, unidentified
  REGION 1..85: note = Description of Unknown:cds_NC_030656.1_cds_YP_009268857.1_142 target sequence
RMHSSVCVVSYPSDISNSLTVRVQAKLLAVNSFDFIYWKECGSLTNPKECTFPNDNKCAGKIFRENNRGYYTTAFTYHHSLTSDL

SEQ ID NO: 41141 - protein, 85 aa, unidentified
  REGION 1..85: note = Description of Unknown:cds_NZ_WFIY01000004.1_cds_WP_155862384.1_121 target sequence
IKFAKRDNKGFFNDVESAIDIGRIHISPFISDELYIYIEDKDLLMNISYFDLIEILNSTRMYKVDMIKRNTRYDKIGIIINQDYL

SEQ ID NO: 41142 - protein, 85 aa, unidentified
  REGION 1..85: note = Description of Unknown:cds_NZ_WFIY01000004.1_cds_WP_155862384.1_121 target sequence
GGISVCTIMDWGTQKIVSSVNNEKIRLDHGPDCEYNDCVYIALFNFFNELYYLKIRITETDIQPSLFKVDLLNFINEIVFYELRQ

SEQ ID NO: 41143 - protein, 84 aa, unidentified
  REGION 1..84: note = Description of Unknown:cds_NZ_WFIY01000004.1_cds_WP_155862384.1_121 target sequence
TIMDWGTQKIVSSVNNEKIRLDHGPDCEYNDCVYIALFNFFNELYYLKIRITETDIQPSLFKVDLLNFINEIVFYELRQKFKLI

SEQ ID NO: 41144 - protein, 85 aa, unidentified
  REGION 1..85: note = Description of Unknown:cds_NZ_WFIY01000004.1_cds_WP_155862384.1_121 target sequence
PFISDELYIYIEDKDLLMNISYFDLIEILNSTRMYKVDMIKRNTRYDKIGIIINQDYLGGISVCTIMDWGTQKIVSSVNNEKIRL

SEQ ID NO: 41145 - protein, 85 aa, unidentified
  REGION 1..85: note = Description of Unknown:cds_NZ_WFIY01000004.1_cds_WP_155862397.1_134 target sequence
SRLKQLLGEAIEEAEKYGSLLSTYLILKKCNAEYDTLVKEKEVNYSFSVDDIILTSLSYKELSKIQFFVMSFLVCDYLSSRYITQ

SEQ ID NO: 41146 - protein, 85 aa, unidentified
  REGION 1..85: note = Description of Unknown:cds_NZ_WFIY01000004.1_cds_WP_155862397.1_134 target sequence
DCLFYFRWNKRIFIYSPRIEAHLLYLIRSGYAEGYKYFKLTEKGRAEAEAKKSLLSNVEKIKIDEISSCVLSKNKLSELKRYVRS

SEQ ID NO: 41147 - protein, 84 aa, unidentified
  REGION 1..84: note = Description of Unknown:cds_NZ_WFIY01000004.1_cds_WP_155862397.1_134 target sequence
RWNKRIFIYSPRIEAHLLYLIRSGYAEGYKYFKLTEKGRAEAEAKKSLLSNVEKIKIDEISSCVLSKNKLSELKRYVRSYIFGK

SEQ ID NO: 41148 - protein, 85 aa, unidentified
  REGION 1..85: note = Description of Unknown:cds_NZ_WFIY01000004.1_cds_WP_155862397.1_134 target sequence
KKCNAEYDTLVKEKEVNYSFSVDDIILTSLSYKELSKIQFFVMSFLVCDYLSSRYITQDCLFYFRWNKRIFIYSPRIEAHLLYLI

SEQ ID NO: 41149 - protein, 85 aa, unidentified
  REGION 1..85: note = Description of Unknown:cds_NZ_WFIY01000004.1_cds_WP_155862596.1_372 target sequence
PLRPGRCYRHFSGPPYTRKEYIPGVPMPKITKFTMGTANKDYDYEVRMIVKELGQIRHNALEAARVMALKRISKLVGNETDFFLW

SEQ ID NO: 41150 - protein, 85 aa, unidentified
  REGION 1..85: note = Description of Unknown:cds_NZ_WFIY01000004.1_cds_WP_155862596.1_372 target sequence
VLKYPHHVLRENKMMAFAGADRLQDGMRLSFGKPIGTAVRIEKQGDVLMILRVKKEHLAFAKEAFEVAAKKLPLDVEIVVTPLKQ

SEQ ID NO: 41151 - protein, 84 aa, unidentified
  REGION 1..84: note = Description of Unknown:cds_NZ_WFIY01000004.1_cds_WP_155862596.1_372 target sequence
HVLRENKMMAFAGADRLQDGMRLSFGKPIGTAVRIEKQGDVLMILRVKKEHLAFAKEAFEVAAKKLPLDVEIVVTPLKQEAKTQ

SEQ ID NO: 41152 - protein, 85 aa, unidentified
  REGION 1..85: note = Description of Unknown:cds_NZ_WFIY01000004.1_cds_WP_155862596.1_372 target sequence
PKITKFTMGTANKDYDYEVRMIVKELGQIRHNALEAARVMALKRISKLVGNETDFFLWVLKYPHHVLRENKMMAFAGADRLQDGM

SEQ ID NO: 41153 - protein, 85 aa, unidentified
  REGION 1..85: note = Description of Unknown:cds_NZ_WFIY01000004.1_cds_WP_155862888.1_733 target sequence
IIVISGPSGSGKTTVAKILSEKLKLRFVSAGQLFREMAASLGKDIIEMNKSAEKKFDIDKLIDEKILDEAKKGNVIIESHIAGWL

SEQ ID NO: 41154 - protein, 85 aa, unidentified
  REGION 1..85: note = Description of Unknown:cds_NZ_WFIY01000004.1_cds_WP_155862888.1_733 target sequence
LSGIADYTIYLWANIEERAKRISIRDKIPYEEALIKIMEREQSHYFRFWKYYGIDLLDLTPFDMVINTSNIDINRIVNIILEYIG

SEQ ID NO: 41155 - protein, 84 aa, unidentified
  REGION 1..84: note = Description of Unknown:cds_NZ_WFIY01000004.1_cds_WP_155862888.1_733 target sequence
YTIYLWANIEERAKRISIRDKIPYEEALIKIMEREQSHYFRFWKYYGIDLLDLTPFDMVINTSNIDINRIVNIILEYIGKNTSV

SEQ ID NO: 41156 - protein, 85 aa, unidentified
  REGION 1..85: note = Description of Unknown:cds_NZ_WFIY01000004.1_cds_WP_155862888.1_733 target sequence
VSAGQLFREMAASLGKDIIEMNKSAEKKFDIDKLIDEKILDEAKKGNVIIESHIAGWLLSGIADYTIYLWANIEERAKRISIRDK

SEQ ID NO: 41157 - protein, 85 aa, unidentified
  REGION 1..85: note = Description of Unknown:cds_NZ_WFIY01000004.1_cds_1079 target sequence
LSEFIFKNGNLVSLYGVAGSGKTAVALQVLEDITPSIYISTQGKSYEARVESMTLTNKNTFFVEANSADELVENIVRGIQLQPEL

SEQ ID NO: 41158 - protein, 85 aa, unidentified
  REGION 1..85: note = Description of Unknown:cds_NZ_WFIY01000004.1_cds_1079 target sequence
LVVDSINTFYRLSRKAVDLIHPLIFLKEFSKYKKVIITWQVSMNNRVSGEKFMRYFSDDVIRVTKNYLIGNLRECKFKITDRGVI

SEQ ID NO: 41159 - protein, 84 aa, unidentified
  REGION 1..84: note = Description of Unknown:cds_NZ_WFIY01000004.1_cds_1079 target sequence
TFYRLSRKAVDLIHPLIFLKEFSKYKKVIITWQVSMNNRVSGEKFMRYFSDDVIRVTKNYLIGNLRECKFKITDRGVIGCLRNY

SEQ ID NO: 41160 - protein, 85 aa, unidentified
  REGION 1..85: note = Description of Unknown:cds_NZ_WFIY01000004.1_cds_1079 target sequence
QVLEDITPSIYISTQGKSYEARVESMTLTNKNTFFVEANSADELVENIVRGIQLQPELLVVDSINTFYRLSRKAVDLIHPLIFLK

SEQ ID NO: 41161 - protein, 85 aa, unidentified
  REGION 1..85: note = Description of Unknown:cds_NZ_WFIY01000004.1_cds_WP_170283908.1_1358 target sequence
IWEEFKLFSYLFMGVKYNEKVKELLDKVKDRKYYENVKKITEMIDSGNKDQLATEFTRCFINDYKHLKCPPYESWYRERTIYGKV

SEQ ID NO: 41162 - protein, 85 aa, unidentified
  REGION 1..85: note = Description of Unknown:cds_NZ_WFIY01000004.1_cds_WP_170283908.1_1358 target sequence
VAELYDIYSKYGIQPMKELPDHISTEMEFLAYVFYLGKEDEGKKFLVEHIFKWVPQFINDIEKYHYGEYTKLLGNSLKLFLEELS

SEQ ID NO: 41163 - protein, 84 aa, unidentified
  REGION 1..84: note = Description of Unknown:cds_NZ_WFIY01000004.1_cds_WP_170283908.1_1358 target sequence
IYSKYGIQPMKELPDHISTEMEFLAYVFYLGKEDEGKKFLVEHIFKWVPQFINDIEKYHYGEYTKLLGNSLKLFLEELSLELNK

SEQ ID NO: 41164 - protein, 85 aa, unidentified
  REGION 1..85: note = Description of Unknown:cds_NZ_WFIY01000004.1_cds_WP_170283908.1_1358 target sequence
VKDRKYYENVKKITEMIDSGNKDQLATEFTRCFINDYKHLKCPPYESWYRERTIYGKVVAELYDIYSKYGIQPMKELPDHISTEM

SEQ ID NO: 41165 - protein, 85 aa, unidentified
  REGION 1..85: note = Description of Unknown:cds_NZ_WFIY01000004.1_cds_WP_155863992.1_1917 target sequence
NKTFQGVYVNPYQLGMQLEAWLAGKGYKTQILQTGNYVVVQAKKEGVLRTIFGADRAFTVRLYGGQGFLQVDVGMSNWLKAGEIT

SEQ ID NO: 41166 - protein, 85 aa, unidentified
  REGION 1..85: note = Description of Unknown:cds_NZ_WFIY01000004.1_cds_WP_155863992.1_1917 target sequence
EDVVAAMVFMPLAAVEGVEEIYNVKIEHDIMKEIERLVNQSTFQPTFNQPMFQPIIQQPVMLPMQEKICKACGYRNPLNARFCMN

SEQ ID NO: 41167 - protein, 84 aa, unidentified
  REGION 1..84: note = Description of Unknown:cds_NZ_WFIY01000004.1_cds_WP_155863992.1_1917 target sequence
MVFMPLAAVEGVEEIYNVKIEHDIMKEIERLVNQSTFQPTFNQPMFQPIIQQPVMLPMQEKICKACGYRNPLNARFCMNCGNPL

SEQ ID NO: 41168 - protein, 85 aa, unidentified
  REGION 1..85: note = Description of Unknown:cds_NZ_WFIY01000004.1_cds_WP_155863992.1_1917 target sequence
KTQILQTGNYVVVQAKKEGVLRTIFGADRAFTVRLYGGQGFLQVDVGMSNWLKAGEITEDVVAAMVFMPLAAVEGVEEIYNVKIE

SEQ ID NO: 41169 - protein, 85 aa, unidentified
  REGION 1..85: note = Description of Unknown:cds_NZ_WFIY01000004.1_cds_WP_155864115.1_2066 target sequence
RTETKALTLGVIAGIFLLSLVVSMDFVYFAPRTAVAYVVNDCAANIALIPNDHHLKSPCGYFAFINAQGDLQINFGKVAPNSVEI

SEQ ID NO: 41170 - protein, 85 aa, unidentified
  REGION 1..85: note = Description of Unknown:cds_NZ_WFIY01000004.1_cds_WP_155864115.1_2066 target sequence
LSDVFYVKNNLNEPVTVTIMADAPKCASIYVFNTSNVNPKAMPDPSSPLVLGPGQEIPITLVLVIYNVPPGTSLTFTIYVTATYN

SEQ ID NO: 41171 - protein, 84 aa, unidentified
  REGION 1..84: note = Description of Unknown:cds_NZ_WFIY01000004.1_cds_WP_155864115.1_2066 target sequence
VKNNLNEPVTVTIMADAPKCASIYVFNTSNVNPKAMPDPSSPLVLGPGQEIPITLVLVIYNVPPGTSLTFTIYVTATYNVVNGQ

SEQ ID NO: 41172 - protein, 85 aa, unidentified
  REGION 1..85: note = Description of Unknown:cds_NZ_WFIY01000004.1_cds_WP_155864115.1_2066 target sequence
YFAPRTAVAYVVNDCAANIALIPNDHHLKSPCGYFAFINAQGDLQINFGKVAPNSVEILSDVFYVKNNLNEPVTVTIMADAPKCA

SEQ ID NO: 41173 - protein, 85 aa, unidentified
  REGION 1..85: note = Description of Unknown:cds_NZ_WFIY01000004.1_cds_WP_155864173.1_2131 target sequence
ENSVSVFMILVATLIIGLIIFALASTYSAVVTGNASISSYASSVAQGLYISTTCPVVSGNTYSIVIVPSDFNYNGTIYLTAIAVN

SEQ ID NO: 41174 - protein, 85 aa, unidentified
  REGION 1..85: note = Description of Unknown:cds_NZ_WFIY01000004.1_cds_WP_155864173.1_2131 target sequence
PSLYGSNVISPYQACPGVNVQINGSSGKVENVILYTTCLKKLYCGEAQIWESTIGSPQIVTVPKCHDAVVWIFIQTQKGLVEVGY

SEQ ID NO: 41175 - protein, 84 aa, unidentified
  REGION 1..84: note = Description of Unknown:cds_NZ_WFIY01000004.1_cds_WP_155864173.1_2131 target sequence
NVISPYQACPGVNVQINGSSGKVENVILYTTCLKKLYCGEAQIWESTIGSPQIVTVPKCHDAVVWIFIQTQKGLVEVGYAWVKE

SEQ ID NO: 41176 - protein, 85 aa, unidentified
  REGION 1..85: note = Description of Unknown:cds_NZ_WFIY01000004.1_cds_WP_155864173.1_2131 target sequence
SAVVTGNASISSYASSVAQGLYISTTCPVVSGNTYSIVIVPSDFNYNGTIYLTAIAVNPSLYGSNVISPYQACPGVNVQINGSSG

SEQ ID NO: 41177 - protein, 85 aa, unidentified
  REGION 1..85: note = Description of Unknown:cds_NZ_WFIY01000004.1_cds_WP_155864263.1_2255 target sequence
TLCYNIMREDILEFLMNRRSIRSFQKKDVDNELLKKLIYVANHAPNSMNREPWKFIIIRDDKTKEELSKLHKGASHLLLAPVNIA

SEQ ID NO: 41178 - protein, 85 aa, unidentified
  REGION 1..85: note = Description of Unknown:cds_NZ_WFIY01000004.1_cds_WP_155864263.1_2255 target sequence
VVGEPDVSPDTWMVDVVNATMYFVLSAYAVGLGVGWVAAYENETAKKILGIPKEKVLVTLLSLGYPDPEYKPKPKAVKSPEEVML

SEQ ID NO: 41179 - protein, 84 aa, unidentified
  REGION 1..84: note = Description of Unknown:cds_NZ_WFIY01000004.1_cds_WP_155864263.1_2255 target sequence
VSPDTWMVDVVNATMYFVLSAYAVGLGVGWVAAYENETAKKILGIPKEKVLVTLLSLGYPDPEYKPKPKAVKSPEEVMLYEKWS

SEQ ID NO: 41180 - protein, 85 aa, unidentified
  REGION 1..85: note = Description of Unknown:cds_NZ_WFIY01000004.1_cds_WP_155864263.1_2255 target sequence
DVDNELLKKLIYVANHAPNSMNREPWKFIIIRDDKTKEELSKLHKGASHLLLAPVNIAVVGEPDVSPDTWMVDVVNATMYFVLSA

SEQ ID NO: 41181 - protein, 85 aa, unidentified
  REGION 1..85: note = Description of Unknown:cds_NZ_WFIY01000004.1_cds_WP_155864310.1_2306 target sequence
PFDFEDLGMGVLLIKPKVFPDKRGFFLELFKATDFSKHNIPMPVQVNMSFSVRGVVRGLHYQITPKEQGKLVFVPKGKILDVAVD

SEQ ID NO: 41182 - protein, 85 aa, unidentified
  REGION 1..85: note = Description of Unknown:cds_NZ_WFIY01000004.1_cds_WP_155864310.1_2306 target sequence
VRKSSPTFGKHISAELSESNHHMLWIPPGFAHGFQALDDSLVVYFVTHNDYSPQHERCINYSYIEWPIKEIIVSDKDKQCPPLDK

SEQ ID NO: 41183 - protein, 84 aa, unidentified
  REGION 1..84: note = Description of Unknown:cds_NZ_WFIY01000004.1_cds_WP_155864310.1_2306 target sequence
TFGKHISAELSESNHHMLWIPPGFAHGFQALDDSLVVYFVTHNDYSPQHERCINYSYIEWPIKEIIVSDKDKQCPPLDKAEVFS

SEQ ID NO: 41184 - protein, 85 aa, unidentified
  REGION 1..85: note = Description of Unknown:cds_NZ_WFIY01000004.1_cds_WP_155864310.1_2306 target sequence
ELFKATDFSKHNIPMPVQVNMSFSVRGVVRGLHYQITPKEQGKLVFVPKGKILDVAVDVRKSSPTFGKHISAELSESNHHMLWIP

SEQ ID NO: 41185 - protein, 85 aa, unidentified
  REGION 1..85: note = Description of Unknown:cds_NC_035460.1_cds_YP_009408021.1_70 target sequence
NRGRIELILGPMFSGKTSELGRRIRRHKIAKRKCVIIKYDKDIRYGKDIFTHDGVSMTAIATSRLNNLYLNFTDYAVIGIDEGQF

SEQ ID NO: 41186 - protein, 85 aa, unidentified
  REGION 1..85: note = Description of Unknown:cds_NC_035460.1_cds_YP_009408021.1_70 target sequence
FPDIVEFCEEMAKIGKIVIIAALDATFQRIPFGNILNIIPIAEEVIKLSSICTICGESASFSKRITNETEVEVIGGIDKYIATCR

SEQ ID NO: 41187 - protein, 84 aa, unidentified
  REGION 1..84: note = Description of Unknown:cds_NC_035460.1_cds_YP_009408021.1_70 target sequence
FCEEMAKIGKIVIIAALDATFQRIPFGNILNIIPIAEEVIKLSSICTICGESASFSKRITNETEVEVIGGIDKYIATCRKCYFL

SEQ ID NO: 41188 - protein, 85 aa, unidentified
  REGION 1..85: note = Description of Unknown:cds_NC_035460.1_cds_YP_009408021.1_70 target sequence
KIAKRKCVIIKYDKDIRYGKDIFTHDGVSMTAIATSRLNNLYLNFTDYAVIGIDEGQFFPDIVEFCEEMAKIGKIVIIAALDATF

SEQ ID NO: 41189 - protein, 85 aa, unidentified
  REGION 1..85: note = Description of Unknown:cds_NC_030656.1_cds_YP_009268814.1_99 target sequence
ATSLDDDVDIESDYESSEYEKEDDEKEDEDDEFSDSDVEKSLDMTSELADKSSLKFKSPETVPSINVQDTVQQSNKISLIKKRYT

SEQ ID NO: 41190 - protein, 85 aa, unidentified
  REGION 1..85: note = Description of Unknown:cds_NC_030656.1_cds_YP_009268814.1_99 target sequence
RRMSLFELTGILAESINLLQRGRLPLVEGLSGSTLQKNLLQVAIQEIRDKTCPVIIKKNGEYLSVNDFDESALEHHLTFITKIWK

SEQ ID NO: 41191 - protein, 84 aa, unidentified
  REGION 1..84: note = Description of Unknown:cds_NC_030656.1_cds_YP_009268814.1_99 target sequence
ELTGILAESINLLQRGRLPLVEGLSGSTLQKNLLQVAIQEIRDKTCPVIIKKNGEYLSVNDFDESALEHHLTFITKIWKQQNRY

SEQ ID NO: 41192 - protein, 85 aa, unidentified
  REGION 1..85: note = Description of Unknown:cds_NC_030656.1_cds_YP_009268814.1_99 target sequence
DEDDEFSDSDVEKSLDMTSELADKSSLKFKSPETVPSINVQDTVQQSNKISLIKKRYTRRMSLFELTGILAESINLLQRGRLPLV

SEQ ID NO: 41193 - protein, 85 aa, unidentified
  REGION 1..85: note = Description of Unknown:cds_NC_030656.1_cds_YP_009268854.1_139 target sequence
YSKALIAAVSVLVYAYAYSNTHATLQKNTYKNKDYVIRMCVPPNASLPIKITCSAKVKSPNVFDNLYWLECNHTEYHLGDCSFLR

SEQ ID NO: 41194 - protein, 85 aa, unidentified
  REGION 1..85: note = Description of Unknown:cds_NC_030656.1_cds_YP_009268854.1_139 target sequence
PACCDEHYRRINRTRLVLKQPWDHELRSTLIINNDTNIIDPIFKCVYRTEGLPNIMINITKFINESDHQGYKVCKRYNNTDYNII

SEQ ID NO: 41195 - protein, 84 aa, unidentified
  REGION 1..84: note = Description of Unknown:cds_NC_030656.1_cds_YP_009268854.1_139 target sequence
HYRRINRTRLVLKQPWDHELRSTLIINNDTNIIDPIFKCVYRTEGLPNIMINITKFINESDHQGYKVCKRYNNTDYNIIRTDEE

SEQ ID NO: 41196 - protein, 85 aa, unidentified
  REGION 1..85: note = Description of Unknown:cds_NC_030656.1_cds_YP_009268854.1_139 target sequence
NTYKNKDYVIRMCVPPNASLPIKITCSAKVKSPNVFDNLYWLECNHTEYHLGDCSFLRPACCDEHYRRINRTRLVLKQPWDHELR

SEQ ID NO: 41197 - protein, 85 aa, unidentified
  REGION 1..85: note = Description of Unknown:vpeps_5XC3_1 target sequence
ENNGYKIILIGSSGVGKSSIVHQFLFNRKISNVSPTIGAAFASKQVIAKNGKTLKLNIWDTAGQERFRSITKMYYTNSLGCLVVF

SEQ ID NO: 41198 - protein, 85 aa, unidentified
  REGION 1..85: note = Description of Unknown:vpeps_5XC3_1 target sequence
DVTDRESFDDVYYWINDLRINCHTTYYILVVANKIDIDKNNWRVSENEIKKFCRDNDCDYVFASSFESDTVNNLFGKMIDKMSEI

SEQ ID NO: 41199 - protein, 85 aa, unidentified
  REGION 1..85: note = Description of Unknown:vpeps_5XC3_1 target sequence
ESFDDVYYWINDLRINCHTTYYILVVANKIDIDKNNWRVSENEIKKFCRDNDCDYVFASSFESDTVNNLFGKMIDKMSEIKINPD

SEQ ID NO: 41200 - protein, 85 aa, unidentified
  REGION 1..85: note = Description of Unknown:vpeps_5XC3_1 target sequence
RKISNVSPTIGAAFASKQVIAKNGKTLKLNIWDTAGQERFRSITKMYYTNSLGCLVVFDVTDRESFDDVYYWINDLRINCHTTYY

SEQ ID NO: 41201 - protein, 85 aa, unidentified
  REGION 1..85: note = Description of Unknown:vpeps_5XC5_1 target sequence
ENNGYKIILIGSSGVGKSSIVHQFLFNRKISNVSPTIGAAFASKQVIAKNGKTLKLNIWDTAGLERFRSITKMYYTNSLGCLVVF

SEQ ID NO: 41202 - protein, 85 aa, unidentified
  REGION 1..85: note = Description of Unknown:vpeps_5XC5_1 target sequence
RKISNVSPTIGAAFASKQVIAKNGKTLKLNIWDTAGLERFRSITKMYYTNSLGCLVVFDVTDRESFDDVYYWINDLRINCHTTYY

SEQ ID NO: 41203 - protein, 85 aa, unidentified
  REGION 1..85: note = Description of Unknown:cds_NC_024711.1_cds_YP_009052545.1_68 target sequence
SEQIDDNYVNGVYVKADGTEQVEIDPQYVYMTVPSKYVCVYHKLLVLMAQYGLDMLNDCSATCKGNNKNIVTCWNMFQSAMAAYQ

SEQ ID NO: 41204 - protein, 85 aa, unidentified
  REGION 1..85: note = Description of Unknown:cds_NC_024711.1_cds_YP_009052545.1_68 target sequence
LGQDKLAETLLKYIKGQLNIIYEGSEQIQYSGSITLPVDEEGKIHAIVSCGDAPKFYVDPETGKLWEKKEEGKEYNETYSLSNVD

SEQ ID NO: 41205 - protein, 84 aa, unidentified
  REGION 1..84: note = Description of Unknown:cds_NC_024711.1_cds_YP_009052545.1_68 target sequence
LAETLLKYIKGQLNIIYEGSEQIQYSGSITLPVDEEGKIHAIVSCGDAPKFYVDPETGKLWEKKEEGKEYNETYSLSNVDYDNE

SEQ ID NO: 41206 - protein, 85 aa, unidentified
  REGION 1..85: note = Description of Unknown:cds_NC_024711.1_cds_YP_009052545.1_68 target sequence
YVYMTVPSKYVCVYHKLLVLMAQYGLDMLNDCSATCKGNNKNIVTCWNMFQSAMAAYQLGQDKLAETLLKYIKGQLNIIYEGSEQ

SEQ ID NO: 41207 - protein, 85 aa, unidentified
  REGION 1..85: note = Description of Unknown:cds_NZ_WFIY01000004.1_cds_WP_155862340.1_67 target sequence
DEVAFLASFIPCSFEGFEMSLFSYIASSNNRKMGNLGTLTGVLLVLSLIYLTYIFLPVLITDTSEYIIRMSLGFLLIGMATLFFF

SEQ ID NO: 41208 - protein, 85 aa, unidentified
  REGION 1..85: note = Description of Unknown:cds_NZ_WFIY01000004.1_cds_WP_155862340.1_67 target sequence
RDYPEARGAFLTASLGITAEGIEVDIFTVSSWIMTGDYTWALIGGILGFIWSLITFRIVSVKFPKRIMKNVAVGLLYTVGFIILT

SEQ ID NO: 41209 - protein, 84 aa, unidentified
  REGION 1..84: note = Description of Unknown:cds_NZ_WFIY01000004.1_cds_WP_155862340.1_67 target sequence
ARGAFLTASLGITAEGIEVDIFTVSSWIMTGDYTWALIGGILGFIWSLITFRIVSVKFPKRIMKNVAVGLLYTVGFIILTSGLI

SEQ ID NO: 41210 - protein, 85 aa, unidentified
  REGION 1..85: note = Description of Unknown:cds_NZ_WFIY01000004.1_cds_WP_155862340.1_67 target sequence
SNNRKMGNLGTLTGVLLVLSLIYLTYIFLPVLITDTSEYIIRMSLGFLLIGMATLFFFRDYPEARGAFLTASLGITAEGIEVDIF

SEQ ID NO: 41211 - protein, 85 aa, unidentified
  REGION 1..85: note = Description of Unknown:cds_NZ_WFIY01000004.1_cds_WP_155862791.1_610 target sequence
RSIKILIPVSLVTWWLPLVGGAIIGFISGTIERKIASAIISVGITSAIASAFYILLGFKVLYVPLLGNLLPVVLVISSAVNSALA

SEQ ID NO: 41212 - protein, 85 aa, unidentified
  REGION 1..85: note = Description of Unknown:cds_NZ_WFIY01000004.1_cds_WP_155862791.1_610 target sequence
VLVAYFISTKMIRSTFEGNNAKIEFYARDQDEINEKLNEIATQCSEPTYSFHSENEVEVTRRCEGFTMRYIIKKEGKLFKVTLFI

SEQ ID NO: 41213 - protein, 84 aa, unidentified
  REGION 1..84: note = Description of Unknown:cds_NZ_WFIY01000004.1_cds_WP_155862791.1_610 target sequence
FISTKMIRSTFEGNNAKIEFYARDQDEINEKLNEIATQCSEPTYSFHSENEVEVTRRCEGFTMRYIIKKEGKLFKVTLFINGDQ

SEQ ID NO: 41214 - protein, 85 aa, unidentified
  REGION 1..85: note = Description of Unknown:cds_NZ_WFIY01000004.1_cds_WP_155862791.1_610 target sequence
SGTIERKIASAIISVGITSAIASAFYILLGFKVLYVPLLGNLLPVVLVISSAVNSALAVLVAYFISTKMIRSTFEGNNAKIEFYA

SEQ ID NO: 41215 - protein, 85 aa, unidentified
  REGION 1..85: note = Description of Unknown:cds_NZ_WFIY01000004.1_cds_WP_152939964.1_897 target sequence
FKIIKAKGVVRIPPEYFGEELDKIALEILKSEYQDKIFKDLGLVLGVLSAKASEEGQIIFGDGATYHEVEFELLTYVPALQEVVE

SEQ ID NO: 41216 - protein, 85 aa, unidentified
  REGION 1..85: note = Description of Unknown:cds_NZ_WFIY01000004.1_cds_WP_152939964.1_897 target sequence
GTVAEVDNYGIYVNLGPMDGLVHISQIADDTFKFDSTRGVLIGEKSKKVLQKGDLVRARIVTVSAVSSSGKLPRIGLTMKQPTLG

SEQ ID NO: 41217 - protein, 84 aa, unidentified
  REGION 1..84: note = Description of Unknown:cds_NZ_WFIY01000004.1_cds_WP_152939964.1_897 target sequence
VDNYGIYVNLGPMDGLVHISQIADDTFKFDSTRGVLIGEKSKKVLQKGDLVRARIVTVSAVSSSGKLPRIGLTMKQPTLGKLNK

SEQ ID NO: 41218 - protein, 85 aa, unidentified
  REGION 1..85: note = Description of Unknown:cds_NZ_WFIY01000004.1_cds_WP_152939964.1_897 target sequence
ILKSEYQDKIFKDLGLVLGVLSAKASEEGQIIFGDGATYHEVEFELLTYVPALQEVVEGTVAEVDNYGIYVNLGPMDGLVHISQI

SEQ ID NO: 41219 - protein, 85 aa, unidentified
  REGION 1..85: note = Description of Unknown:cds_NZ_WFIY01000004.1_cds_WP_155863422.1_1404 target sequence
LEIENLSNSIIFSKPLPLSFIKDFFSTDSENFNYDGVNVFVDKDERNENFVKSLTFSSLNSDKSQILHDRYLRWLSLKVRLNEVI

SEQ ID NO: 41220 - protein, 85 aa, unidentified
  REGION 1..85: note = Description of Unknown:cds_NZ_WFIY01000004.1_cds_WP_155863422.1_1404 target sequence
WAYQINAEIKAKTKELIKTPSVLPLVGNVMLTGLIIANTKNLNMNQRRFCIVQIDTTVKIIKRDENYFSISRIINDLKELLKVLE

SEQ ID NO: 41221 - protein, 84 aa, unidentified
  REGION 1..84: note = Description of Unknown:cds_NZ_WFIY01000004.1_cds_WP_155863422.1_1404 target sequence
AEIKAKTKELIKTPSVLPLVGNVMLTGLIIANTKNLNMNQRRFCIVQIDTTVKIIKRDENYFSISRIINDLKELLKVLEESFKL

SEQ ID NO: 41222 - protein, 85 aa, unidentified
  REGION 1..85: note = Description of Unknown:cds_NZ_WFIY01000004.1_cds_WP_155863422.1_1404 target sequence
DSENFNYDGVNVFVDKDERNENFVKSLTFSSLNSDKSQILHDRYLRWLSLKVRLNEVIWAYQINAEIKAKTKELIKTPSVLPLVG

SEQ ID NO: 41223 - protein, 85 aa, unidentified
  REGION 1..85: note = Description of Unknown:cds_NZ_WFIY01000004.1_cds_WP_155864155.1_2109 target sequence
DIALSDFILIIAAVIIGLVIFSFTTAYIAPQYAFTYAEQNAKTISQSTFISISPPETTNSGCYNYLVDIYSPGFSGNFTVIAFYI

SEQ ID NO: 41224 - protein, 85 aa, unidentified
  REGION 1..85: note = Description of Unknown:cds_NZ_WFIY01000004.1_cds_WP_155864155.1_2109 target sequence
PSSELQSIAIVTPSSSFPVYINSTLALKVTLSNVYDINGHILVSSISGYTVPANYPIQIIAPPKPGCSLVIWIIYSDGEYNFRVL

SEQ ID NO: 41225 - protein, 84 aa, unidentified
  REGION 1..84: note = Description of Unknown:cds_NZ_WFIY01000004.1_cds_WP_155864155.1_2109 target sequence
QSIAIVTPSSSFPVYINSTLALKVTLSNVYDINGHILVSSISGYTVPANYPIQIIAPPKPGCSLVIWIIYSDGEYNFRVLYAYG

SEQ ID NO: 41226 - protein, 85 aa, unidentified
  REGION 1..85: note = Description of Unknown:cds_NZ_WFIY01000004.1_cds_WP_155864155.1_2109 target sequence
IAPQYAFTYAEQNAKTISQSTFISISPPETTNSGCYNYLVDIYSPGFSGNFTVIAFYIPSSELQSIAIVTPSSSFPVYINSTLAL

SEQ ID NO: 41227 - protein, 85 aa, unidentified
  REGION 1..85: note = Description of Unknown:cds_NC_040415.1_cds_YP_009551541.1_10 target sequence
DQFADFNYTMGIASMVNSTLYTIFGSTVSAYFPYVASIITIVFTLHKLFVPTAKMAFKTSKCSYQMVKYCIVSTTNVILKLLGYK

SEQ ID NO: 41228 - protein, 85 aa, unidentified
  REGION 1..85: note = Description of Unknown:cds_NC_040415.1_cds_YP_009551541.1_10 target sequence
TQITTGEVMEQQMDRVMNEMKRQLDMIDKLTTREIEQVELLKRIYEKLNVSKVEGMDMSYETNMKEVMGAVEWENGKNPYEPKEI

SEQ ID NO: 41229 - protein, 84 aa, unidentified
  REGION 1..84: note = Description of Unknown:cds_NC_040415.1_cds_YP_009551541.1_10 target sequence
GEVMEQQMDRVMNEMKRQLDMIDKLTTREIEQVELLKRIYEKLNVSKVEGMDMSYETNMKEVMGAVEWENGKNPYEPKEITASL

SEQ ID NO: 41230 - protein, 85 aa, unidentified
  REGION 1..85: note = Description of Unknown:cds_NC_040415.1_cds_YP_009551541.1_10 target sequence
VSAYFPYVASIITIVFTLHKLFVPTAKMAFKTSKCSYQMVKYCIVSTTNVILKLLGYKTQITTGEVMEQQMDRVMNEMKRQLDMI

SEQ ID NO: 41231 - protein, 85 aa, unidentified
  REGION 1..85: note = Description of Unknown:cds_NC_029316.1_cds_YP_009230320.1_67 target sequence
YIYKKKILRKFLRMVNGKIITVKKDIVDLISRHSFTIQRINDDEIFLKIDDENGIKFEKTSKGAILKLKDSKGIEHYRYLIFPCG

SEQ ID NO: 41232 - protein, 85 aa, unidentified
  REGION 1..85: note = Description of Unknown:cds_NC_029316.1_cds_YP_009230320.1_67 target sequence
ILLLRVKTTRGDIFYFTHSLVFERVSSIEIKRDEEKIEVTGKPGDKNVRIHLKDVVLVRKTGDNTYYIYSKNKKLERELRRKLKK

SEQ ID NO: 41233 - protein, 84 aa, unidentified
  REGION 1..84: note = Description of Unknown:cds_NC_029316.1_cds_YP_009230320.1_67 target sequence
VKTTRGDIFYFTHSLVFERVSSIEIKRDEEKIEVTGKPGDKNVRIHLKDVVLVRKTGDNTYYIYSKNKKLERELRRKLKKKLGF

SEQ ID NO: 41234 - protein, 85 aa, unidentified
  REGION 1..85: note = Description of Unknown:cds_NC_029316.1_cds_YP_009230320.1_67 target sequence
DLISRHSFTIQRINDDEIFLKIDDENGIKFEKTSKGAILKLKDSKGIEHYRYLIFPCGILLLRVKTTRGDIFYFTHSLVFERVSS

SEQ ID NO: 41235 - protein, 85 aa, unidentified
  REGION 1..85: note = Description of Unknown:cds_NC_030656.1_cds_YP_009268719.1_4 target sequence
AGYITFTLSLVLVFAFFDHAISARTTMHSSICVVKYPSESSKSLTVRFQAKVLTVRVSDGVYWSACGSRRMPRKCTFTNDNQSNY

SEQ ID NO: 41236 - protein, 85 aa, unidentified
  REGION 1..85: note = Description of Unknown:cds_NC_030656.1_cds_YP_009268719.1_4 target sequence
NVKIDVNSEYIEEDSFTYHHSLTSELTVFDVEKTAPVYTAKYLGLEVKEHVVDVWQVVHERNVKVCVEESSELFWRHERIKKRIE

SEQ ID NO: 41237 - protein, 84 aa, unidentified
  REGION 1..84: note = Description of Unknown:cds_NC_030656.1_cds_YP_009268719.1_4 target sequence
VNSEYIEEDSFTYHHSLTSELTVFDVEKTAPVYTAKYLGLEVKEHVVDVWQVVHERNVKVCVEESSELFWRHERIKKRIEHSEL

SEQ ID NO: 41238 - protein, 85 aa, unidentified
  REGION 1..85: note = Description of Unknown:cds_NC_030656.1_cds_YP_009268719.1_4 target sequence
HSSICVVKYPSESSKSLTVRFQAKVLTVRVSDGVYWSACGSRRMPRKCTFTNDNQSNYNVKIDVNSEYIEEDSFTYHHSLTSELT

SEQ ID NO: 41239 - protein, 85 aa, unidentified
  REGION 1..85: note = Description of Unknown:cds_NC_030656.1_cds_YP_009268844.1_129 target sequence
ALFRKLNRQSKNKIKKCYNPTAVFITILSLLSSIGAILKYTNILITEACENNWIAVDGFCYYSANTSSNRTHASNLCKNYNADLL

SEQ ID NO: 41240 - protein, 85 aa, unidentified
  REGION 1..85: note = Description of Unknown:cds_NC_030656.1_cds_YP_009268844.1_129 target sequence
SFQSSHHVLVVYGLTNSSTWIDVGNSLELLKKIDNDTMTPVVQNLTMFTTKLTDQCVAFNGTNVILSNCSTNANVMCSKKFFSHK

SEQ ID NO: 41241 - protein, 84 aa, unidentified
  REGION 1..84: note = Description of Unknown:cds_NC_030656.1_cds_YP_009268844.1_129 target sequence
HHVLVVYGLTNSSTWIDVGNSLELLKKIDNDTMTPVVQNLTMFTTKLTDQCVAFNGTNVILSNCSTNANVMCSKKFFSHKWFIL

SEQ ID NO: 41242 - protein, 85 aa, unidentified
  REGION 1..85: note = Description of Unknown:cds_NC_030656.1_cds_YP_009268844.1_129 target sequence
LSLLSSIGAILKYTNILITEACENNWIAVDGFCYYSANTSSNRTHASNLCKNYNADLLSFQSSHHVLVVYGLTNSSTWIDVGNSL

SEQ ID NO: 41243 - protein, 85 aa, unidentified
  REGION 1..85: note = Description of Unknown:cds_NC_011504.2_cds_YP_002302223.1_10 target sequence
EKLTDLNYTLSVITLMNNTLHTILEDPGMAYFPYIASVLTVLFALHKASIPTMKIALKTSKCSYKVVKYCIVTIFNTLLKLAGYK

SEQ ID NO: 41244 - protein, 85 aa, unidentified
  REGION 1..85: note = Description of Unknown:cds_NC_011504.2_cds_YP_002302223.1_10 target sequence
EQITTKDEIEKQMDRVVKEMRRQLEMIDKLTTREIEQVELLKRIYDKLTVQTTGEIDMTKEINQKNVRTLEEWESGKNPYEPREV

SEQ ID NO: 41245 - protein, 84 aa, unidentified
  REGION 1..84: note = Description of Unknown:cds_NC_011504.2_cds_YP_002302223.1_10 target sequence
KDEIEKQMDRVVKEMRRQLEMIDKLTTREIEQVELLKRIYDKLTVQTTGEIDMTKEINQKNVRTLEEWESGKNPYEPREVTAAM

SEQ ID NO: 41246 - protein, 85 aa, unidentified
  REGION 1..85: note = Description of Unknown:cds_NC_011504.2_cds_YP_002302223.1_10 target sequence
GMAYFPYIASVLTVLFALHKASIPTMKIALKTSKCSYKVVKYCIVTIFNTLLKLAGYKEQITTKDEIEKQMDRVVKEMRRQLEMI

SEQ ID NO: 41247 - protein, 85 aa, unidentified
  REGION 1..85: note = Description of Unknown:cds_NC_007409.1_cds_YP_319847.1_16 target sequence
LQTWAKLAYEANLGIVYGSTLIILLLPLIGSFMPPNLVSSISKLNAFTLLESYLLPVLSNFGIFGGLALGVGSAIAFSVLNSIAS

SEQ ID NO: 41248 - protein, 85 aa, unidentified
  REGION 1..85: note = Description of Unknown:cds_NC_007409.1_cds_YP_319847.1_16 target sequence
SFLNLSFNQQQALTIVVALLVSQFIFGGWATFALFLTSMLGSVPPVPGLAVIMSFITPFIDGLIATLGGLMVVLSILYELSEIGL

SEQ ID NO: 41249 - protein, 84 aa, unidentified
  REGION 1..84: note = Description of Unknown:cds_NC_007409.1_cds_YP_319847.1_16 target sequence
SFNQQQALTIVVALLVSQFIFGGWATFALFLTSMLGSVPPVPGLAVIMSFITPFIDGLIATLGGLMVVLSILYELSEIGLVTLP

SEQ ID NO: 41250 - protein, 85 aa, unidentified
  REGION 1..85: note = Description of Unknown:cds_NC_007409.1_cds_YP_319847.1_16 target sequence
LIGSFMPPNLVSSISKLNAFTLLESYLLPVLSNFGIFGGLALGVGSAIAFSVLNSIASSFLNLSFNQQQALTIVVALLVSQFIFG

SEQ ID NO: 41251 - protein, 85 aa, unidentified
  REGION 1..85: note = Description of Unknown:hvTR_P03081 target sequence
DKVLNREESLQLMDLLGLERSAWGNIPLMRKAYLKKCKEFHPDKGGDEEKMKKMNTLYKKMEDGVKYAHQPDFGGFWDATEVFAS

SEQ ID NO: 41252 - protein, 85 aa, unidentified
  REGION 1..85: note = Description of Unknown:hvTR_P03081 target sequence
SLNPGVDAMYCKQWPECAKKMSANCICLLCLLRMKHENRKLYRKDPLVWVDCYCFDCFRMWFGLDLCEGTLLLWCDIIGQTTYRD

SEQ ID NO: 41253 - protein, 84 aa, unidentified
  REGION 1..84: note = Description of Unknown:hvTR_P03081 target sequence
GVDAMYCKQWPECAKKMSANCICLLCLLRMKHENRKLYRKDPLVWVDCYCFDCFRMWFGLDLCEGTLLLWCDIIGQTTYRDLKL

SEQ ID NO: 41254 - protein, 85 aa, unidentified
  REGION 1..85: note = Description of Unknown:hvTR_P03081 target sequence
LMRKAYLKKCKEFHPDKGGDEEKMKKMNTLYKKMEDGVKYAHQPDFGGFWDATEVFASSLNPGVDAMYCKQWPECAKKMSANCIC

SEQ ID NO: 41255 - protein, 85 aa, unidentified
  REGION 1..85: note = Description of Unknown:cds_NZ_WFIY01000004.1_cds_WP_155862652.1_444 target sequence
FTRTGDDGNTNVINKRVGKDSPLVNMLGDLDEVNSFLGLALAKLPWDDMKKDIEKIQYELFAIGEELSTGNIKITQENVKWLEER

SEQ ID NO: 41256 - protein, 85 aa, unidentified
  REGION 1..85: note = Description of Unknown:cds_NZ_WFIY01000004.1_cds_WP_155862652.1_444 target sequence
TIAYRKESGPVKLFVIPGGSEEASYLHVARSIVRRVERNAVKYSKEIEFDKWIIVYLNRLSSLLFSMAIVANKRKGIEERIYDIR

SEQ ID NO: 41257 - protein, 84 aa, unidentified
  REGION 1..84: note = Description of Unknown:cds_NZ_WFIY01000004.1_cds_WP_155862652.1_444 target sequence
RKESGPVKLFVIPGGSEEASYLHVARSIVRRVERNAVKYSKEIEFDKWIIVYLNRLSSLLFSMAIVANKRKGIEERIYDIRKYF

SEQ ID NO: 41258 - protein, 85 aa, unidentified
  REGION 1..85: note = Description of Unknown:cds_NZ_WFIY01000004.1_cds_WP_155862652.1_444 target sequence
GDLDEVNSFLGLALAKLPWDDMKKDIEKIQYELFAIGEELSTGNIKITQENVKWLEERTIAYRKESGPVKLFVIPGGSEEASYLH

SEQ ID NO: 41259 - protein, 85 aa, unidentified
  REGION 1..85: note = Description of Unknown:cds_NZ_WFIY01000004.1_cds_WP_155862967.1_835 target sequence
PSQKMLVKTLKTRELMKILEKIIIEFECSYDELYEYFSKYHIYEIIGEKFSQISISTSDFSNIIDIISKIGLHPYMVGTPILRIT

SEQ ID NO: 41260 - protein, 85 aa, unidentified
  REGION 1..85: note = Description of Unknown:cds_NZ_WFIY01000004.1_cds_WP_155862967.1_835 target sequence
ESKKIFPLLPLGNILSKYCKKIIRLNENLINKLIYGKTIEINEKINFNRVIILNNYGEFIAYAKITREKNSTLIIPELDIGWYLR

SEQ ID NO: 41261 - protein, 84 aa, unidentified
  REGION 1..84: note = Description of Unknown:cds_NZ_WFIY01000004.1_cds_WP_155862967.1_835 target sequence
IFPLLPLGNILSKYCKKIIRLNENLINKLIYGKTIEINEKINFNRVIILNNYGEFIAYAKITREKNSTLIIPELDIGWYLRKGG

SEQ ID NO: 41262 - protein, 85 aa, unidentified
  REGION 1..85: note = Description of Unknown:cds_NZ_WFIY01000004.1_cds_WP_155862967.1_835 target sequence
CSYDELYEYFSKYHIYEIIGEKFSQISISTSDFSNIIDIISKIGLHPYMVGTPILRITESKKIFPLLPLGNILSKYCKKIIRLNE

SEQ ID NO: 41263 - protein, 85 aa, unidentified
  REGION 1..85: note = Description of Unknown:cds_NZ_WFIY01000004.1_cds_WP_155863017.1_899 target sequence
LEIRDKYKVDLCFSLPKEVRKELSRPYGILFKSTEKLLKYADNFERIITVGDVVTQELLKNNRSVFLSIVDGKTKRNIKLNMKFS

SEQ ID NO: 41264 - protein, 85 aa, unidentified
  REGION 1..85: note = Description of Unknown:cds_NZ_WFIY01000004.1_cds_WP_155863017.1_899 target sequence
NYVTVKNEPGIIRLSAMSYIKSALNSSLSSVIYVDGEEDLLVIPATIYGREGDLVIYGQPNAGAVALEVCEATKWRVNDIFSKFN

SEQ ID NO: 41265 - protein, 84 aa, unidentified
  REGION 1..84: note = Description of Unknown:cds_NZ_WFIY01000004.1_cds_WP_155863017.1_899 target sequence
KNEPGIIRLSAMSYIKSALNSSLSSVIYVDGEEDLLVIPATIYGREGDLVIYGQPNAGAVALEVCEATKWRVNDIFSKFNVKKC

SEQ ID NO: 41266 - protein, 85 aa, unidentified
  REGION 1..85: note = Description of Unknown:cds_NZ_WFIY01000004.1_cds_WP_155863017.1_899 target sequence
GILFKSTEKLLKYADNFERIITVGDVVTQELLKNNRSVFLSIVDGKTKRNIKLNMKFSNYVTVKNEPGIIRLSAMSYIKSALNSS

SEQ ID NO: 41267 - protein, 85 aa, unidentified
  REGION 1..85: note = Description of Unknown:cds_NZ_WFIY01000004.1_cds_WP_170283906.1_1205 target sequence
LVPINFILNVIHGFFGMIYYGAILLFGLFFPKLEKLEREEEILTSLFPSLVSFIESTGMITVVFGAGEFIHYMIGYYKDGGVQEV

SEQ ID NO: 41268 - protein, 85 aa, unidentified
  REGION 1..85: note = Description of Unknown:cds_NZ_WFIY01000004.1_cds_WP_170283906.1_1205 target sequence
QKALLTGWGFSILVGGILGLAGFFIGLNIAFLFERIFKAYRSIDPSSIEELNVLKSKLSFYSKLGAILLTLSVIFMILGVSFLPL

SEQ ID NO: 41269 - protein, 84 aa, unidentified
  REGION 1..84: note = Description of Unknown:cds_NZ_WFIY01000004.1_cds_WP_170283906.1_1205 target sequence
TGWGFSILVGGILGLAGFFIGLNIAFLFERIFKAYRSIDPSSIEELNVLKSKLSFYSKLGAILLTLSVIFMILGVSFLPLPQIK

SEQ ID NO: 41270 - protein, 85 aa, unidentified
  REGION 1..85: note = Description of Unknown:cds_NZ_WFIY01000004.1_cds_WP_170283906.1_1205 target sequence
LFFPKLEKLEREEEILTSLFPSLVSFIESTGMITVVFGAGEFIHYMIGYYKDGGVQEVQKALLTGWGFSILVGGILGLAGFFIGL

SEQ ID NO: 41271 - protein, 85 aa, unidentified
  REGION 1..85: note = Description of Unknown:cds_NZ_WFIY01000004.1_cds_WP_155863380.1_1353 target sequence
AQTSVETTQKYLPILRITLGWMFFSAFVRRTINVPAKLNPHSSAYVGGKLITFLPHAWGPVKGVLIWLLQNPPLLYTFLIMFTAL

SEQ ID NO: 41272 - protein, 85 aa, unidentified
  REGION 1..85: note = Description of Unknown:cds_NZ_WFIY01000004.1_cds_WP_155863380.1_1353 target sequence
EAIFGLLMMLGLLTRLSGLVLAGLAWGIGFGGGWLGSTCVDEWQIASMEGAAAFMFVFTGSRWLSIDQLLYKKYNKGIKIWKYYI

SEQ ID NO: 41273 - protein, 84 aa, unidentified
  REGION 1..84: note = Description of Unknown:cds_NZ_WFIY01000004.1_cds_WP_155863380.1_1353 target sequence
GLLMMLGLLTRLSGLVLAGLAWGIGFGGGWLGSTCVDEWQIASMEGAAAFMFVFTGSRWLSIDQLLYKKYNKGIKIWKYYIPLW

SEQ ID NO: 41274 - protein, 85 aa, unidentified
  REGION 1..85: note = Description of Unknown:cds_NZ_WFIY01000004.1_cds_WP_155863380.1_1353 target sequence
VRRTINVPAKLNPHSSAYVGGKLITFLPHAWGPVKGVLIWLLQNPPLLYTFLIMFTALEAIFGLLMMLGLLTRLSGLVLAGLAWG

SEQ ID NO: 41275 - protein, 85 aa, unidentified
  REGION 1..85: note = Description of Unknown:cds_NZ_WFIY01000004.1_cds_WP_155863755.1_1628 target sequence
QCPPLSGPPIIKKDGVDLFKNPIVRKWYDFFIENWQSKKEIAFLLPCTSIKPYNRSPTHKLAYSIAKGKDYIQFYSVSEPMLLVP

SEQ ID NO: 41276 - protein, 85 aa, unidentified
  REGION 1..85: note = Description of Unknown:cds_NZ_WFIY01000004.1_cds_WP_155863755.1_1628 target sequence
REYEECYPFNSYDYPPSMMTEEEKKEFVDLLSIMLRKISSQHERIIAVLPRHHYNIVSRASEKAGIKIEMHPYGRLAFKTISEVL

SEQ ID NO: 41277 - protein, 84 aa, unidentified
  REGION 1..84: note = Description of Unknown:cds_NZ_WFIY01000004.1_cds_WP_155863755.1_1628 target sequence
ECYPFNSYDYPPSMMTEEEKKEFVDLLSIMLRKISSQHERIIAVLPRHHYNIVSRASEKAGIKIEMHPYGRLAFKTISEVLKTL

SEQ ID NO: 41278 - protein, 85 aa, unidentified
  REGION 1..85: note = Description of Unknown:cds_NZ_WFIY01000004.1_cds_WP_155863755.1_1628 target sequence
YDFFIENWQSKKEIAFLLPCTSIKPYNRSPTHKLAYSIAKGKDYIQFYSVSEPMLLVPREYEECYPFNSYDYPPSMMTEEEKKEF

SEQ ID NO: 41279 - protein, 85 aa, unidentified
  REGION 1..85: note = Description of Unknown:vpeps_5Y5O_1 target sequence
SNAMDSSASVVFMRFAPPGEETALPPRRATPGSVAYDLFPSEEMDIEPMGLAKISTGYGIDKFPDGCYGQIVSRSGMTWKNNTSV

SEQ ID NO: 41280 - protein, 85 aa, unidentified
  REGION 1..85: note = Description of Unknown:vpeps_5Y5O_1 target sequence
PTGTIDVDYRGELKVILRNHSAEKSVPIRKGTSIAQLIFLRYCDVEEEQIVYINETTGERTIIDSSSKKDNKNQARSVRGTGGFG

SEQ ID NO: 41281 - protein, 85 aa, unidentified
  REGION 1..85: note = Description of Unknown:vpeps_5Y5O_1 target sequence
IDVDYRGELKVILRNHSAEKSVPIRKGTSIAQLIFLRYCDVEEEQIVYINETTGERTIIDSSSKKDNKNQARSVRGTGGFGSTDN

SEQ ID NO: 41282 - protein, 85 aa, unidentified
  REGION 1..85: note = Description of Unknown:vpeps_5Y5O_1 target sequence
RATPGSVAYDLFPSEEMDIEPMGLAKISTGYGIDKFPDGCYGQIVSRSGMTWKNNTSVPTGTIDVDYRGELKVILRNHSAEKSVP

SEQ ID NO: 41283 - protein, 85 aa, unidentified
  REGION 1..85: note = Description of Unknown:vpeps_5Y5Q_1 target sequence
PTGTINVDYRGELKVILRNHSAEKSVPIRKGTSIAQLIFLRYCDVEEEQIVYINETTGERTIIDSSSKKDNKNQAESVRGTGGFG

SEQ ID NO: 41284 - protein, 85 aa, unidentified
  REGION 1..85: note = Description of Unknown:vpeps_5Y5Q_1 target sequence
INVDYRGELKVILRNHSAEKSVPIRKGTSIAQLIFLRYCDVEEEQIVYINETTGERTIIDSSSKKDNKNQAESVRGTGGFGSTDN

SEQ ID NO: 41285 - protein, 85 aa, unidentified
  REGION 1..85: note = Description of Unknown:vpeps_5Y5Q_1 target sequence
RATPGSVAYDLFPSEEMDIEPMGLAKISTGYGIDKFPDGCYGQIVSRSGMTWKNNTSVPTGTINVDYRGELKVILRNHSAEKSVP

SEQ ID NO: 41286 - protein, 85 aa, unidentified
  REGION 1..85: note = Description of Unknown:cds_NZ_WFIY01000004.1_cds_WP_155862740.1_549 target sequence
LVRCPLKLVYEEKFRELAIAEVYNPSTLMGELIHMGLETFNEIEGYKVISEVEGEKEVNLGEKVVKIKGRADIILQKGEEKIIVE

SEQ ID NO: 41287 - protein, 85 aa, unidentified
  REGION 1..85: note = Description of Unknown:cds_NZ_WFIY01000004.1_cds_WP_155862740.1_549 target sequence
IKSARGDKGLPHKHHLMQLQAYLWLFGAKKGILFYVTPERFTEFTVDKPLDEATIIKLVQENISLSPSPRFAWECEYCVFSIVCP

SEQ ID NO: 41288 - protein, 84 aa, unidentified
  REGION 1..84: note = Description of Unknown:cds_NZ_WFIY01000004.1_cds_WP_155862740.1_549 target sequence
RGDKGLPHKHHLMQLQAYLWLFGAKKGILFYVTPERFTEFTVDKPLDEATIIKLVQENISLSPSPRFAWECEYCVFSIVCPNKK

SEQ ID NO: 41289 - protein, 85 aa, unidentified
  REGION 1..85: note = Description of Unknown:cds_NZ_WFIY01000004.1_cds_WP_155862740.1_549 target sequence
LMGELIHMGLETFNEIEGYKVISEVEGEKEVNLGEKVVKIKGRADIILQKGEEKIIVEIKSARGDKGLPHKHHLMQLQAYLWLFG

SEQ ID NO: 41290 - protein, 85 aa, unidentified
  REGION 1..85: note = Description of Unknown:cds_NZ_WFIY01000004.1_cds_WP_155862964.1_831 target sequence
LLRGIYPGRFQPFHLGHLSVVKWALERVDELIIIVGSAQESHTLNNPFTAGERIEMIRMALTEYGIPADRYYIIPIPDILMNNVW

SEQ ID NO: 41291 - protein, 85 aa, unidentified
  REGION 1..85: note = Description of Unknown:cds_NZ_WFIY01000004.1_cds_WP_155862964.1_831 target sequence
AYHVKMYVPTFQKVFARNPLVVRLFKEAGVEIDIPPAFNRDKYNSTLIRKLIIMNEEWKDLVPSSVYNYIKSIKGDERLKEITGS

SEQ ID NO: 41292 - protein, 84 aa, unidentified
  REGION 1..84: note = Description of Unknown:cds_NZ_WFIY01000004.1_cds_WP_155862964.1_831 target sequence
KMYVPTFQKVFARNPLVVRLFKEAGVEIDIPPAFNRDKYNSTLIRKLIIMNEEWKDLVPSSVYNYIKSIKGDERLKEITGSDKK

SEQ ID NO: 41293 - protein, 85 aa, unidentified
  REGION 1..85: note = Description of Unknown:cds_NZ_WFIY01000004.1_cds_WP_155862964.1_831 target sequence
VDELIIIVGSAQESHTLNNPFTAGERIEMIRMALTEYGIPADRYYIIPIPDILMNNVWAYHVKMYVPTFQKVFARNPLVVRLFKE

SEQ ID NO: 41294 - protein, 85 aa, unidentified
  REGION 1..85: note = Description of Unknown:cds_NZ_WFIY01000004.1_cds_WP_155862968.1_837 target sequence
DFLWAPWRSKYVADSSKSKKEEYCIFCEFPKQNNDERNLIVYRSKYAYLILNRFPYNPAHVMIVPYRHISSIELLEDNEAQDIFR

SEQ ID NO: 41295 - protein, 85 aa, unidentified
  REGION 1..85: note = Description of Unknown:cds_NZ_WFIY01000004.1_cds_WP_155862968.1_837 target sequence
LVKITLAAIRKVYSPDGFNVGINIGRTAGAGIEAHVHVHIVPRWNGDANFMPVLSNTKVLPEDLETTYVKIKNAIKDIINNEDSL

SEQ ID NO: 41296 - protein, 84 aa, unidentified
  REGION 1..84: note = Description of Unknown:cds_NZ_WFIY01000004.1_cds_WP_155862968.1_837 target sequence
ITLAAIRKVYSPDGFNVGINIGRTAGAGIEAHVHVHIVPRWNGDANFMPVLSNTKVLPEDLETTYVKIKNAIKDIINNEDSLDH

SEQ ID NO: 41297 - protein, 85 aa, unidentified
  REGION 1..85: note = Description of Unknown:cds_NZ_WFIY01000004.1_cds_WP_155862968.1_837 target sequence
EFPKQNNDERNLIVYRSKYAYLILNRFPYNPAHVMIVPYRHISSIELLEDNEAQDIFRLVKITLAAIRKVYSPDGFNVGINIGRT

SEQ ID NO: 41298 - protein, 85 aa, unidentified
  REGION 1..85: note = Description of Unknown:cds_NZ_WFIY01000004.1_cds_WP_155863894.1_1800 target sequence
VEYFIPSWDDIEDSIFNVSEKIIKDYNPDVIIAILTGGVIPAKLISDIIGIKNIKYIEIKFYKEVGKTQPKPTLKAIYVDNLENK

SEQ ID NO: 41299 - protein, 85 aa, unidentified
  REGION 1..85: note = Description of Unknown:cds_NZ_WFIY01000004.1_cds_WP_155863894.1_1800 target sequence
NVLIVDDVSDTGETLSAVSRVIELFNPQNIKSATIYVKPWSRKYPDYYDKVVDKWIVFPWDKWEAVREHNEIPVKNKDRFLKSFI

SEQ ID NO: 41300 - protein, 84 aa, unidentified
  REGION 1..84: note = Description of Unknown:cds_NZ_WFIY01000004.1_cds_WP_155863894.1_1800 target sequence
IVDDVSDTGETLSAVSRVIELFNPQNIKSATIYVKPWSRKYPDYYDKVVDKWIVFPWDKWEAVREHNEIPVKNKDRFLKSFIRK

SEQ ID NO: 41301 - protein, 85 aa, unidentified
  REGION 1..85: note = Description of Unknown:cds_NZ_WFIY01000004.1_cds_WP_155863894.1_1800 target sequence
PDVIIAILTGGVIPAKLISDIIGIKNIKYIEIKFYKEVGKTQPKPTLKAIYVDNLENKNVLIVDDVSDTGETLSAVSRVIELFNP

SEQ ID NO: 41302 - protein, 85 aa, unidentified
  REGION 1..85: note = Description of Unknown:cds_NZ_WFIY01000004.1_cds_WP_155863931.1_1845 target sequence
LSIESNYSNNVSPTEEIKVGHALAHIVAAASIVEEIEGELPEVNDTVRKYADAWIMEMAPIDYYPGLAEMLGCRIKKKLTQVFDE

SEQ ID NO: 41303 - protein, 85 aa, unidentified
  REGION 1..85: note = Description of Unknown:cds_NZ_WFIY01000004.1_cds_WP_155863931.1_1845 target sequence
ITEDELATTLDDAIELKRALDNGEIVYNYADMEVRIERLLRALGVEINDFASVLDTPDFYLKLRRLLAILVVAIGISSVRTKWIA

SEQ ID NO: 41304 - protein, 84 aa, unidentified
  REGION 1..84: note = Description of Unknown:cds_NZ_WFIY01000004.1_cds_WP_155863931.1_1845 target sequence
ELATTLDDAIELKRALDNGEIVYNYADMEVRIERLLRALGVEINDFASVLDTPDFYLKLRRLLAILVVAIGISSVRTKWIAESQ

SEQ ID NO: 41305 - protein, 85 aa, unidentified
  REGION 1..85: note = Description of Unknown:cds_NZ_WFIY01000004.1_cds_WP_155863931.1_1845 target sequence
AAASIVEEIEGELPEVNDTVRKYADAWIMEMAPIDYYPGLAEMLGCRIKKKLTQVFDEITEDELATTLDDAIELKRALDNGEIVY

SEQ ID NO: 41306 - protein, 85 aa, unidentified
  REGION 1..85: note = Description of Unknown:cds_NZ_WFIY01000004.1_cds_WP_155864305.1_2300 target sequence
NPSFLKQGNYVSLIASIIILLGLIYLEIEGISYALSLTFVFIMWIVWFLALPSFAYYHLARLEKPKIMDYFAILAIMITLVGLII

SEQ ID NO: 41307 - protein, 85 aa, unidentified
  REGION 1..85: note = Description of Unknown:cds_NZ_WFIY01000004.1_cds_WP_155864305.1_2300 target sequence
VTFLREFLGIEIIVAGYTFEPIAGISIYLTANKINKIFSSLFFWGAVIFTAGLPLYLVNFGYMSIIGDVIKTLGIIGLLSLSRKL

SEQ ID NO: 41308 - protein, 84 aa, unidentified
  REGION 1..84: note = Description of Unknown:cds_NZ_WFIY01000004.1_cds_WP_155864305.1_2300 target sequence
LREFLGIEIIVAGYTFEPIAGISIYLTANKINKIFSSLFFWGAVIFTAGLPLYLVNFGYMSIIGDVIKTLGIIGLLSLSRKLKA

SEQ ID NO: 41309 - protein, 85 aa, unidentified
  REGION 1..85: note = Description of Unknown:cds_NZ_WFIY01000004.1_cds_WP_155864305.1_2300 target sequence
IEGISYALSLTFVFIMWIVWFLALPSFAYYHLARLEKPKIMDYFAILAIMITLVGLIIVTFLREFLGIEIIVAGYTFEPIAGISI

SEQ ID NO: 41310 - protein, 85 aa, unidentified
  REGION 1..85: note = Description of Unknown:cds_NC_030656.1_cds_YP_009268803.1_88 target sequence
STFVRQMYLPIMMDPHELTFEVWENIKRIVMDTYLHKETSGIMAINITVYKDKELPLGELINNQIMVQVPCNVVFKYYKMGDIVS

SEQ ID NO: 41311 - protein, 85 aa, unidentified
  REGION 1..85: note = Description of Unknown:cds_NC_030656.1_cds_YP_009268803.1_88 target sequence
GTLSITDENDVQVLCSDLTCVLARGAGTVSFSDSKYCFVKNGVVYPNGSTVTAVLKEARSSKNSNFEFLAALVDPPKEEDDELAS

SEQ ID NO: 41312 - protein, 84 aa, unidentified
  REGION 1..84: note = Description of Unknown:cds_NC_030656.1_cds_YP_009268803.1_88 target sequence
SITDENDVQVLCSDLTCVLARGAGTVSFSDSKYCFVKNGVVYPNGSTVTAVLKEARSSKNSNFEFLAALVDPPKEEDDELASSK

SEQ ID NO: 41313 - protein, 85 aa, unidentified
  REGION 1..85: note = Description of Unknown:cds_NC_030656.1_cds_YP_009268803.1_88 target sequence
RIVMDTYLHKETSGIMAINITVYKDKELPLGELINNQIMVQVPCNVVFKYYKMGDIVSGTLSITDENDVQVLCSDLTCVLARGAG

SEQ ID NO: 41314 - protein, 85 aa, unidentified
  REGION 1..85: note = Description of Unknown:hvTR_P15000 target sequence
DKVLNREESMELMDLLGLERAAWGNLPLMRKAYLKKCKEFHPDKGGDEDKMKRMNTLYKKMEQDVKVAHQPDFGTWNSSEVCADF

SEQ ID NO: 41315 - protein, 85 aa, unidentified
  REGION 1..85: note = Description of Unknown:hvTR_P15000 target sequence
PLCPDTLYCKEWPICSKKPSVHCPCMLCQLRLRHLNRKFLRKEPLVWIDCYCIDCFTQWFGLDLTEETLQWWVQIIGETPFRDLK

SEQ ID NO: 41316 - protein, 84 aa, unidentified
  REGION 1..84: note = Description of Unknown:hvTR_P15000 target sequence
CPDTLYCKEWPICSKKPSVHCPCMLCQLRLRHLNRKFLRKEPLVWIDCYCIDCFTQWFGLDLTEETLQWWVQIIGETPFRDLKL

SEQ ID NO: 41317 - protein, 85 aa, unidentified
  REGION 1..85: note = Description of Unknown:hvTR_P15000 target sequence
LMRKAYLKKCKEFHPDKGGDEDKMKRMNTLYKKMEQDVKVAHQPDFGTWNSSEVCADFPLCPDTLYCKEWPICSKKPSVHCPCML

SEQ ID NO: 41318 - protein, 85 aa, unidentified
  REGION 1..85: note = Description of Unknown:hvTR_P03083.1 target sequence
DKVLNREESMELMDLLGLDRSAWGNIPVMRKAYLKKCKELHPDKGGDEDKMKRMNFLYKKMEQGVKVAHQPDFGTWNSSEVGCDF

SEQ ID NO: 41319 - protein, 85 aa, unidentified
  REGION 1..85: note = Description of Unknown:hvTR_P03083.1 target sequence
PPNSDTLYCKEWPNCATNPSVHCPCLMCMLKLRHRNRKFLRSSPLVWIDCYCFDCFRQWFGCDLTQEALHCWEKVLGDTPYRDLK

SEQ ID NO: 41320 - protein, 84 aa, unidentified
  REGION 1..84: note = Description of Unknown:hvTR_P03083.1 target sequence
NSDTLYCKEWPNCATNPSVHCPCLMCMLKLRHRNRKFLRSSPLVWIDCYCFDCFRQWFGCDLTQEALHCWEKVLGDTPYRDLKL

SEQ ID NO: 41321 - protein, 85 aa, unidentified
  REGION 1..85: note = Description of Unknown:hvTR_P03083.1 target sequence
VMRKAYLKKCKELHPDKGGDEDKMKRMNFLYKKMEQGVKVAHQPDFGTWNSSEVGCDFPPNSDTLYCKEWPNCATNPSVHCPCLM

SEQ ID NO: 41322 - protein, 85 aa, unidentified
  REGION 1..85: note = Description of Unknown:cds_NZ_WFIY01000004.1_cds_WP_155862299.1_14 target sequence
ESKIPAIEKHRDAYVKIRIIESLDELALGLKLLKEGFSRNSANKVFQSWKAIISALTVINLEKMPRNEKEKEWYYKSGFLAPTTG

SEQ ID NO: 41323 - protein, 85 aa, unidentified
  REGION 1..85: note = Description of Unknown:cds_NZ_WFIY01000004.1_cds_WP_155862299.1_14 target sequence
LKGISQRLEELGYKVNSLTSVALELHRYAYNGLYKGASYYYEREEAINDIIYLSKEIMKVIKEFFKEYWDEEIEEHYNLAEKELM

SEQ ID NO: 41324 - protein, 84 aa, unidentified
  REGION 1..84: note = Description of Unknown:cds_NZ_WFIY01000004.1_cds_WP_155862299.1_14 target sequence
GISQRLEELGYKVNSLTSVALELHRYAYNGLYKGASYYYEREEAINDIIYLSKEIMKVIKEFFKEYWDEEIEEHYNLAEKELMK

SEQ ID NO: 41325 - protein, 85 aa, unidentified
  REGION 1..85: note = Description of Unknown:cds_NZ_WFIY01000004.1_cds_WP_155862299.1_14 target sequence
LGLKLLKEGFSRNSANKVFQSWKAIISALTVINLEKMPRNEKEKEWYYKSGFLAPTTGLKGISQRLEELGYKVNSLTSVALELHR

SEQ ID NO: 41326 - protein, 85 aa, unidentified
  REGION 1..85: note = Description of Unknown:cds_NZ_WFIY01000004.1_cds_WP_155862571.1_341 target sequence
WYTGAGDGGKTKVPSKGEVWKDDDVVEALGNLDELNASLGVISSLYPQLFDLIYKIQDDVFVISSEIAGFNLNFSEEKIKELENL

SEQ ID NO: 41327 - protein, 85 aa, unidentified
  REGION 1..85: note = Description of Unknown:cds_NZ_WFIY01000004.1_cds_WP_155862571.1_341 target sequence
IAKFGGEIKPLRNFVLPGGYLASSFLHLSRAICRRAERSVVKIMREGKARDVHVKYLNRLSSLLFVLALWVNEKSGNPNVIWKRF

SEQ ID NO: 41328 - protein, 84 aa, unidentified
  REGION 1..84: note = Description of Unknown:cds_NZ_WFIY01000004.1_cds_WP_155862571.1_341 target sequence
KFGGEIKPLRNFVLPGGYLASSFLHLSRAICRRAERSVVKIMREGKARDVHVKYLNRLSSLLFVLALWVNEKSGNPNVIWKRFG

SEQ ID NO: 41329 - protein, 85 aa, unidentified
  REGION 1..85: note = Description of Unknown:cds_NZ_WFIY01000004.1_cds_WP_155862571.1_341 target sequence
ALGNLDELNASLGVISSLYPQLFDLIYKIQDDVFVISSEIAGFNLNFSEEKIKELENLIAKFGGEIKPLRNFVLPGGYLASSFLH

SEQ ID NO: 41330 - protein, 85 aa, unidentified
  REGION 1..85: note = Description of Unknown:cds_NZ_WFIY01000004.1_cds_WP_155862758.1_571 target sequence
QLAIAVHSSLNKELEDKIRKFFENLKCNPTILVGGYWGGMKVVVDEAVKKKLKVVVILPEEREDVELPPDVIRINSGCEYRCRSV

SEQ ID NO: 41331 - protein, 85 aa, unidentified
  REGION 1..85: note = Description of Unknown:cds_NZ_WFIY01000004.1_cds_WP_155862758.1_571 target sequence
ILVRSADLLVSLGGEVGTTIEIFMAYAMGKRALVLTDTGFSTDKLKTAFPEYLDNRKVMKVEYYSSPEDLAKEVCKPITQIKMNF

SEQ ID NO: 41332 - protein, 84 aa, unidentified
  REGION 1..84: note = Description of Unknown:cds_NZ_WFIY01000004.1_cds_WP_155862758.1_571 target sequence
VRSADLLVSLGGEVGTTIEIFMAYAMGKRALVLTDTGFSTDKLKTAFPEYLDNRKVMKVEYYSSPEDLAKEVCKPITQIKMNFG

SEQ ID NO: 41333 - protein, 85 aa, unidentified
  REGION 1..85: note = Description of Unknown:cds_NZ_WFIY01000004.1_cds_WP_155862758.1_571 target sequence
NPTILVGGYWGGMKVVVDEAVKKKLKVVVILPEEREDVELPPDVIRINSGCEYRCRSVILVRSADLLVSLGGEVGTTIEIFMAYA

SEQ ID NO: 41334 - protein, 85 aa, unidentified
  REGION 1..85: note = Description of Unknown:cds_NZ_WFIY01000004.1_cds_WP_205737159.1_866 target sequence
KGLICCKSYLFLIMKEEEDYIKVNRVDAFVYPLDGLPVMVCYLEDGREFNLFYVPIEIVIAINKIKKQYEEDSILGDKRETIFDI

SEQ ID NO: 41335 - protein, 85 aa, unidentified
  REGION 1..85: note = Description of Unknown:cds_NZ_WFIY01000004.1_cds_WP_205737159.1_866 target sequence
LSFIPEVTEEISKHINKVTIDDISGSVYIATIELKFDGVIIQKRMIPSHAIYLALISNKPIYVKKSLVDEQEKERKKGGGEEEEK

SEQ ID NO: 41336 - protein, 84 aa, unidentified
  REGION 1..84: note = Description of Unknown:cds_NZ_WFIY01000004.1_cds_WP_205737159.1_866 target sequence
FIPEVTEEISKHINKVTIDDISGSVYIATIELKFDGVIIQKRMIPSHAIYLALISNKPIYVKKSLVDEQEKERKKGGGEEEEKK

SEQ ID NO: 41337 - protein, 85 aa, unidentified
  REGION 1..85: note = Description of Unknown:cds_NZ_WFIY01000004.1_cds_WP_205737159.1_866 target sequence
AFVYPLDGLPVMVCYLEDGREFNLFYVPIEIVIAINKIKKQYEEDSILGDKRETIFDILSFIPEVTEEISKHINKVTIDDISGSV

SEQ ID NO: 41338 - protein, 85 aa, unidentified
  REGION 1..85: note = Description of Unknown:cds_NZ_WFIY01000004.1_cds_WP_155863084.1_997 target sequence
ILGDRDLKYYLEKGWIVISPLTQDTIRENGVDLRVGGEIARFRKTDEVYEDGKDPRSFYEIEKGDEFIIHPNEHVLLVTEEYVKL

SEQ ID NO: 41339 - protein, 85 aa, unidentified
  REGION 1..85: note = Description of Unknown:cds_NZ_WFIY01000004.1_cds_WP_155863084.1_997 target sequence
PNDVMAFVNLRSSFARLGLFIPPTIVDAGFEGQLTIEVLGSAFPVKIKRGTRFLHLIFAKTLTPVENPYHGKYQGQQGVTLPKNG

SEQ ID NO: 41340 - protein, 84 aa, unidentified
  REGION 1..84: note = Description of Unknown:cds_NZ_WFIY01000004.1_cds_WP_155863084.1_997 target sequence
DVMAFVNLRSSFARLGLFIPPTIVDAGFEGQLTIEVLGSAFPVKIKRGTRFLHLIFAKTLTPVENPYHGKYQGQQGVTLPKNGR

SEQ ID NO: 41341 - protein, 85 aa, unidentified
  REGION 1..85: note = Description of Unknown:cds_NZ_WFIY01000004.1_cds_WP_155863084.1_997 target sequence
ENGVDLRVGGEIARFRKTDEVYEDGKDPRSFYEIEKGDEFIIHPNEHVLLVTEEYVKLPNDVMAFVNLRSSFARLGLFIPPTIVD

SEQ ID NO: 41342 - protein, 85 aa, unidentified
  REGION 1..85: note = Description of Unknown:cds_NZ_WFIY01000004.1_cds_WP_155863195.1_1129 target sequence
NFKVILIGVIIFLIGLAGLLLLPLYFPNYSIVNNQYVKHYSTVTIPGNAGKIVLTFNITKANNSIIAFIKSGNANISILNGTYFS

SEQ ID NO: 41343 - protein, 85 aa, unidentified
  REGION 1..85: note = Description of Unknown:cds_NZ_WFIY01000004.1_cds_WP_155863195.1_1129 target sequence
HVICNKQSMVSLILSPGCYEMEIINDESTPQNITYTYGIFNAGFITSFYNGLGIITTIMEIIAVGGIALAFISFIYELLSIRRRK

SEQ ID NO: 41344 - protein, 84 aa, unidentified
  REGION 1..84: note = Description of Unknown:cds_NZ_WFIY01000004.1_cds_WP_155863195.1_1129 target sequence
ICNKQSMVSLILSPGCYEMEIINDESTPQNITYTYGIFNAGFITSFYNGLGIITTIMEIIAVGGIALAFISFIYELLSIRRRKK

SEQ ID NO: 41345 - protein, 85 aa, unidentified
  REGION 1..85: note = Description of Unknown:cds_NZ_WFIY01000004.1_cds_WP_155863195.1_1129 target sequence
NYSIVNNQYVKHYSTVTIPGNAGKIVLTFNITKANNSIIAFIKSGNANISILNGTYFSHVICNKQSMVSLILSPGCYEMEIINDE

SEQ ID NO: 41346 - protein, 85 aa, unidentified
  REGION 1..85: note = Description of Unknown:cds_NZ_WFIY01000004.1_cds_WP_155864420.1_1325 target sequence
TYVNYETNEVKLGDLEYRVLQLLKENSRIPVSEIAKKLKVSRSTVSRIITSLQEKGIKFTVEYNEGVTAFVVTSKCPQNAECFEL

SEQ ID NO: 41347 - protein, 85 aa, unidentified
  REGION 1..85: note = Description of Unknown:cds_NZ_WFIY01000004.1_cds_WP_155864420.1_1325 target sequence
IDGNIMAVIHARDLNELEEELKKINDEKKYLFLSHKKVGKINVRVEMRCDYCGGVIRGSPLILKKGRKTYYACCKACLDGLKNKL

SEQ ID NO: 41348 - protein, 84 aa, unidentified
  REGION 1..84: note = Description of Unknown:cds_NZ_WFIY01000004.1_cds_WP_155864420.1_1325 target sequence
GNIMAVIHARDLNELEEELKKINDEKKYLFLSHKKVGKINVRVEMRCDYCGGVIRGSPLILKKGRKTYYACCKACLDGLKNKLK

SEQ ID NO: 41349 - protein, 85 aa, unidentified
  REGION 1..85: note = Description of Unknown:cds_NZ_WFIY01000004.1_cds_WP_155864420.1_1325 target sequence
RIPVSEIAKKLKVSRSTVSRIITSLQEKGIKFTVEYNEGVTAFVVTSKCPQNAECFELIDGNIMAVIHARDLNELEEELKKINDE

SEQ ID NO: 41350 - protein, 85 aa, unidentified
  REGION 1..85: note = Description of Unknown:cds_NZ_WFIY01000004.1_cds_WP_155863389.1_1364 target sequence
QKVYPVIGAILISVSFFLNLMGIVTSAVGIYLVTSYIRLLYVEYKREKELGKFLYLAMSMLFLSFVSFSIGMYISFGFSKFFVIL

SEQ ID NO: 41351 - protein, 85 aa, unidentified
  REGION 1..85: note = Description of Unknown:cds_NZ_WFIY01000004.1_cds_WP_155863389.1_1364 target sequence
PPSSVFSLAVIVYTYVLSGIFYIVSAVYLIKSVTPLTVFTKIKGVSYSIYLMGISAILLFSIVTAPGGVILSFIAWMWFAVNLYL

SEQ ID NO: 41352 - protein, 84 aa, unidentified
  REGION 1..84: note = Description of Unknown:cds_NZ_WFIY01000004.1_cds_WP_155863389.1_1364 target sequence
SSVFSLAVIVYTYVLSGIFYIVSAVYLIKSVTPLTVFTKIKGVSYSIYLMGISAILLFSIVTAPGGVILSFIAWMWFAVNLYLT

SEQ ID NO: 41353 - protein, 85 aa, unidentified
  REGION 1..85: note = Description of Unknown:cds_NZ_WFIY01000004.1_cds_WP_155863389.1_1364 target sequence
VGIYLVTSYIRLLYVEYKREKELGKFLYLAMSMLFLSFVSFSIGMYISFGFSKFFVILPPSSVFSLAVIVYTYVLSGIFYIVSAV

SEQ ID NO: 41354 - protein, 85 aa, unidentified
  REGION 1..85: note = Description of Unknown:cds_NZ_WFIY01000004.1_cds_WP_155863890.1_1796 target sequence
EPKLIFEAKLKCPVCGNETLIARDYLYDAGEVGKLVLSNWECTSCNYKFRDVKPYETRGPKTLEFVVEKEEDLNVMVYRSPFAIV

SEQ ID NO: 41355 - protein, 85 aa, unidentified
  REGION 1..85: note = Description of Unknown:cds_NZ_WFIY01000004.1_cds_WP_155863890.1_1796 target sequence
KIPELGIEIYPADASQGILSTVEGILEDFLENLGSLCQENDCHDVYEAKEGKRKFTLIIEDSSGLSFIKSEKVKITRSLSLSQTQ

SEQ ID NO: 41356 - protein, 84 aa, unidentified
  REGION 1..84: note = Description of Unknown:cds_NZ_WFIY01000004.1_cds_WP_155863890.1_1796 target sequence
PELGIEIYPADASQGILSTVEGILEDFLENLGSLCQENDCHDVYEAKEGKRKFTLIIEDSSGLSFIKSEKVKITRSLSLSQTQP

SEQ ID NO: 41357 - protein, 85 aa, unidentified
  REGION 1..85: note = Description of Unknown:cds_NZ_WFIY01000004.1_cds_WP_155863890.1_1796 target sequence
DAGEVGKLVLSNWECTSCNYKFRDVKPYETRGPKTLEFVVEKEEDLNVMVYRSPFAIVKIPELGIEIYPADASQGILSTVEGILE

SEQ ID NO: 41358 - protein, 85 aa, unidentified
  REGION 1..85: note = Description of Unknown:cds_NZ_WFIY01000004.1_cds_WP_155864467.1_1911 target sequence
LKNLKYLGVEVEVVNINADLEYTKKFDCMIFSGGPYSVEQEINKMGNSPLFVKELSVPKLGICLGHQLLAYVLGGKVGKANNPEF

SEQ ID NO: 41359 - protein, 85 aa, unidentified
  REGION 1..85: note = Description of Unknown:cds_NZ_WFIY01000004.1_cds_WP_155864467.1_1911 target sequence
GLARITIDDHDTILQGLKKEFNAWESHNDEVKEVPPGFFAIAHSENTKVEAMVNKDSSIFGVQFHPEVKHTEDGIEIFKNFLTVC

SEQ ID NO: 41360 - protein, 84 aa, unidentified
  REGION 1..84: note = Description of Unknown:cds_NZ_WFIY01000004.1_cds_WP_155864467.1_1911 target sequence
RITIDDHDTILQGLKKEFNAWESHNDEVKEVPPGFFAIAHSENTKVEAMVNKDSSIFGVQFHPEVKHTEDGIEIFKNFLTVCKK

SEQ ID NO: 41361 - protein, 85 aa, unidentified
  REGION 1..85: note = Description of Unknown:cds_NZ_WFIY01000004.1_cds_WP_155864467.1_1911 target sequence
CMIFSGGPYSVEQEINKMGNSPLFVKELSVPKLGICLGHQLLAYVLGGKVGKANNPEFGLARITIDDHDTILQGLKKEFNAWESH

SEQ ID NO: 41362 - protein, 85 aa, unidentified
  REGION 1..85: note = Description of Unknown:cds_NZ_WFIY01000004.1_cds_WP_155864008.1_1936 target sequence
IKYPLSTLALILNVIVALLPYCWWTYSVGGIVRINDSLFLLNIYFEGQYLYISNFINMILFAFRFYVIAVSLYFLYLMLRKGEKR

SEQ ID NO: 41363 - protein, 85 aa, unidentified
  REGION 1..85: note = Description of Unknown:cds_NZ_WFIY01000004.1_cds_WP_155864008.1_1936 target sequence
SYLLVAWASLFYILDPVIIYIIFNYVISHFVQGVTYPFFIIGQESVEFVDSGYQITMLIQSYPTFTYWFSLAVGIINLISRFLKK

SEQ ID NO: 41364 - protein, 84 aa, unidentified
  REGION 1..84: note = Description of Unknown:cds_NZ_WFIY01000004.1_cds_WP_155864008.1_1936 target sequence
LLVAWASLFYILDPVIIYIIFNYVISHFVQGVTYPFFIIGQESVEFVDSGYQITMLIQSYPTFTYWFSLAVGIINLISRFLKKY

SEQ ID NO: 41365 - protein, 85 aa, unidentified
  REGION 1..85: note = Description of Unknown:cds_NZ_WFIY01000004.1_cds_WP_155864008.1_1936 target sequence
VGGIVRINDSLFLLNIYFEGQYLYISNFINMILFAFRFYVIAVSLYFLYLMLRKGEKRSYLLVAWASLFYILDPVIIYIIFNYVI

SEQ ID NO: 41366 - protein, 85 aa, unidentified; identical to SEQ ID NO: 41322
  REGION 1..85: note = Description of Unknown:cds_NZ_WFIY01000004.1_cds_WP_155862299.1_2337 target sequence

SEQ ID NO: 41367 - protein, 85 aa, unidentified; identical to SEQ ID NO: 41323
  REGION 1..85: note = Description of Unknown:cds_NZ_WFIY01000004.1_cds_WP_155862299.1_2337 target sequence

SEQ ID NO: 41368 - protein, 84 aa, unidentified; identical to SEQ ID NO: 41324
  REGION 1..84: note = Description of Unknown:cds_NZ_WFIY01000004.1_cds_WP_155862299.1_2337 target sequence

SEQ ID NO: 41369 - protein, 85 aa, unidentified
  REGION 1..85: note = Description of Unknown:cds_NC_035460.1_cds_YP_009408027.1_76 target sequence
DKKSLYENVLLKSTGSLPKARAPTKMTRVTEYVYLGNYNDAMNIHKSGIDFKYILNLTTEKYTLLCSNVTILHIPLYDDTKTNVS

SEQ ID NO: 41370 - protein, 85 aa, unidentified
  REGION 1..85: note = Description of Unknown:cds_NC_035460.1_cds_YP_009408027.1_76 target sequence
QYFDYVTNFLANCDTRKEPILVHCVAGVNRSGVMICAYLMSKRQKNIPAFIYFLYIYHSMREQRGAFVENPSFRKQIIEKYILED

SEQ ID NO: 41371 - protein, 84 aa, unidentified
  REGION 1..84: note = Description of Unknown:cds_NC_035460.1_cds_YP_009408027.1_76 target sequence
FDYVTNFLANCDTRKEPILVHCVAGVNRSGVMICAYLMSKRQKNIPAFIYFLYIYHSMREQRGAFVENPSFRKQIIEKYILEDN

SEQ ID NO: 41372 - protein, 85 aa, unidentified
  REGION 1..85: note = Description of Unknown:cds_NC_035460.1_cds_YP_009408027.1_76 target sequence
RVTEYVYLGNYNDAMNIHKSGIDFKYILNLTTEKYTLLCSNVTILHIPLYDDTKTNVSQYFDYVTNFLANCDTRKEPILVHCVAG

SEQ ID NO: 41373 - protein, 85 aa, unidentified
  REGION 1..85: note = Description of Unknown:cds_NC_035460.1_cds_YP_009408083.1_132 target sequence
SAKYLYTPLGAICYNTDEEYSFICSNIGITSVSSIGPYKLATFDIKHIDISNINVDYLENFYLSFNGILVHCSKINRVTNPITNI

SEQ ID NO: 41374 - protein, 85 aa, unidentified
  REGION 1..85: note = Description of Unknown:cds_NC_035460.1_cds_YP_009408083.1_132 target sequence
YHAFVANKNLIIVCDFKPITFIKDGIKFYVENNKNILTCSVLEIYNYKNNYEFILNPSKEFLKEIYLSCHICFSDNNGWIIADCK

SEQ ID NO: 41375 - protein, 84 aa, unidentified
  REGION 1..84: note = Description of Unknown:cds_NC_035460.1_cds_YP_009408083.1_132 target sequence
AFVANKNLIIVCDFKPITFIKDGIKFYVENNKNILTCSVLEIYNYKNNYEFILNPSKEFLKEIYLSCHICFSDNNGWIIADCKK

SEQ ID NO: 41376 - protein, 85 aa, unidentified
  REGION 1..85: note = Description of Unknown:cds_NC_035460.1_cds_YP_009408083.1_132 target sequence
GITSVSSIGPYKLATFDIKHIDISNINVDYLENFYLSFNGILVHCSKINRVTNPITNIYHAFVANKNLIIVCDFKPITFIKDGIK

SEQ ID NO: 41377 - protein, 85 aa, unidentified
  REGION 1..85: note = Description of Unknown:cds_NC_029316.1_cds_YP_009230256.1_3 target sequence
FTQELKIGEGSLRYDRVGMMEIVHPFIIDSNKISILFVYDLIERKFVSASYINHEEKTMSFEVEPNDHSLFEICCINKECKLRLF

SEQ ID NO: 41378 - protein, 85 aa, unidentified
  REGION 1..85: note = Description of Unknown:cds_NC_029316.1_cds_YP_009230256.1_3 target sequence
DVHVKTEIRVDYDGYDQEEVTDVVVIEKYNVSFDRDWFRSISNDRDTPDIIGFVSAYLIPLDLPETNFPYYNTNEIAEVMKEFFE

SEQ ID NO: 41379 - protein, 84 aa, unidentified
  REGION 1..84: note = Description of Unknown:cds_NC_029316.1_cds_YP_009230256.1_3 target sequence
HVKTEIRVDYDGYDQEEVTDVVVIEKYNVSFDRDWFRSISNDRDTPDIIGFVSAYLIPLDLPETNFPYYNTNEIAEVMKEFFEM

SEQ ID NO: 41380 - protein, 85 aa, unidentified
  REGION 1..85: note = Description of Unknown:cds_NC_029316.1_cds_YP_009230256.1_3 target sequence
IDSNKISILFVYDLIERKFVSASYINHEEKTMSFEVEPNDHSLFEICCINKECKLRLFDVHVKTEIRVDYDGYDQEEVTDVVVIE

SEQ ID NO: 41381 - protein, 85 aa, unidentified
  REGION 1..85: note = Description of Unknown:cds_NC_029316.1_cds_YP_009230333.1_80 target sequence
MLILDLDGTLFDTSARWNECEKISNKNKRLFWAPDRVFWECYQSPRFMNLDEPKWEVIRFVKRLIEEKKPEVIAVVSGRSEKQRE

SEQ ID NO: 41382 - protein, 85 aa, unidentified
  REGION 1..85: note = Description of Unknown:cds_NC_029316.1_cds_YP_009230333.1_80 target sequence
ATLKQLSEIGIEPNEVVLRGEKDFRKDYEFKKFAIKELMEKYDQDKVIVIDDSDAVLEHLEEEGLIEIIDAKTIKKREKKENMNT

SEQ ID NO: 41383 - protein, 84 aa, unidentified
  REGION 1..84: note = Description of Unknown:cds_NC_029316.1_cds_YP_009230333.1_80 target sequence
LKQLSEIGIEPNEVVLRGEKDFRKDYEFKKFAIKELMEKYDQDKVIVIDDSDAVLEHLEEEGLIEIIDAKTIKKREKKENMNTP

SEQ ID NO: 41384 - protein, 85 aa, unidentified
  REGION 1..85: note = Description of Unknown:cds_NC_029316.1_cds_YP_009230333.1_80 target sequence
KRLFWAPDRVFWECYQSPRFMNLDEPKWEVIRFVKRLIEEKKPEVIAVVSGRSEKQREATLKQLSEIGIEPNEVVLRGEKDFRKD

SEQ ID NO: 41385 - protein, 85 aa, unidentified
  REGION 1..85: note = Description of Unknown:cds_NC_024711.1_cds_YP_009052537.2_60 target sequence
IPVTQFILGNSDPLLYPSEKMTNSIDEQIAFLQSQKQAINEAYRRNAIPNANNGTTQNQQVPTQGIWDAIDAEIAPLTQEQQNML

SEQ ID NO: 41386 - protein, 85 aa, unidentified
  REGION 1..85: note = Description of Unknown:cds_NC_024711.1_cds_YP_009052537.2_60 target sequence
LSNQDYVNNYNALQSMVQAEVLNLVRGKIEASADGKHLLEEQLKLVKLLKSKIVEVTNKEMELFKAFKEASKTNPNLTYEEFLKK

SEQ ID NO: 41387 - protein, 84 aa, unidentified
  REGION 1..84: note = Description of Unknown:cds_NC_024711.1_cds_YP_009052537.2_60 target sequence
SNQDYVNNYNALQSMVQAEVLNLVRGKIEASADGKHLLEEQLKLVKLLKSKIVEVTNKEMELFKAFKEASKTNPNLTYEEFLKK

SEQ ID NO: 41388 - protein, 85 aa, unidentified
  REGION 1..85: note = Description of Unknown:cds_NC_024711.1_cds_YP_009052537.2_60 target sequence
QIAFLQSQKQAINEAYRRNAIPNANNGTTQNQQVPTQGIWDAIDAEIAPLTQEQQNMLLSNQDYVNNYNALQSMVQAEVLNLVRG

SEQ ID NO: 41389 - protein, 85 aa, unidentified
  REGION 1..85: note = Description of Unknown:cds_NZ_WFIY01000004.1_cds_WP_155862502.1_261 target sequence
KATVEYYKPEIININNFSLVSIKKYNEEEVDYSENLESKTINGEVIIVKYKEGEIINASVDCKYKFPFPVKIFRIGIPREFNNEN

SEQ ID NO: 41390 - protein, 85 aa, unidentified
  REGION 1..85: note = Description of Unknown:cds_NZ_WFIY01000004.1_cds_WP_155862502.1_261 target sequence
VKLDYINVAVDSLIIGLNFDLKDYPFIILDTSNGAKIISSSDINEVKPTIVKNKKKKKSKKAKKKKNAKKSSKKRKVKSKSTRKG

SEQ ID NO: 41391 - protein, 84 aa, unidentified
  REGION 1..84: note = Description of Unknown:cds_NZ_WFIY01000004.1_cds_WP_155862502.1_261 target sequence
KLDYINVAVDSLIIGLNFDLKDYPFIILDTSNGAKIISSSDINEVKPTIVKNKKKKKSKKAKKKKNAKKSSKKRKVKSKSTRKG

SEQ ID NO: 41392 - protein, 85 aa, unidentified
  REGION 1..85: note = Description of Unknown:cds_NZ_WFIY01000004.1_cds_WP_155862502.1_261 target sequence
EEVDYSENLESKTINGEVIIVKYKEGEIINASVDCKYKFPFPVKIFRIGIPREFNNENVKLDYINVAVDSLIIGLNFDLKDYPFI

SEQ ID NO: 41393 - protein, 85 aa, unidentified
  REGION 1..85: note = Description of Unknown:cds_NZ_WFIY01000004.1_cds_WP_155862566.1_335 target sequence
PIEDFMGKKPRVSKNVFLHPTAYIIGDVEIGEMSSVWHYVVIRGDNDSISIGKESNIQENSTIHTDPGFKVEIGDKVTVGHNAVI

SEQ ID NO: 41394 - protein, 85 aa, unidentified
  REGION 1..85: note = Description of Unknown:cds_NZ_WFIY01000004.1_cds_WP_155862566.1_335 target sequence
HGAKVSSNVIIGIGSILLNGSKVGEYSIVGAGSVVPPNAEIPPYSVAMGVPAKVVRKIREEEIKMIEDNAYEYVLHVKRFLNNES

SEQ ID NO: 41395 - protein, 84 aa, unidentified
  REGION 1..84: note = Description of Unknown:cds_NZ_WFIY01000004.1_cds_WP_155862566.1_335 target sequence
GAKVSSNVIIGIGSILLNGSKVGEYSIVGAGSVVPPNAEIPPYSVAMGVPAKVVRKIREEEIKMIEDNAYEYVLHVKRFLNNES

SEQ ID NO: 41396 - protein, 85 aa, unidentified
  REGION 1..85: note = Description of Unknown:cds_NZ_WFIY01000004.1_cds_WP_155862566.1_335 target sequence
VEIGEMSSVWHYVVIRGDNDSISIGKESNIQENSTIHTDPGFKVEIGDKVTVGHNAVIHGAKVSSNVIIGIGSILLNGSKVGEYS

SEQ ID NO: 41397 - protein, 85 aa, unidentified
  REGION 1..85: note = Description of Unknown:cds_NZ_WFIY01000004.1_cds_WP_155864380.1_627 target sequence
AAPPGPINAIMANESLRSKLHGSSVGFGAMTADFIFFLITFEVRKFIPENLLVVFYFIGGGLMVFLSYTTLKAKVSNRSKKGNYF

SEQ ID NO: 41398 - protein, 85 aa, unidentified
  REGION 1..85: note = Description of Unknown:cds_NZ_WFIY01000004.1_cds_WP_155864380.1_627 target sequence
TGLIMGITNPYQISWWITVGLFMINEFGISIILPFFGGIIIWIFAFTTFINRLGNKYAKYVKIFSFIILLAFGLYMIYEGVISLL

SEQ ID NO: 41399 - protein, 84 aa, unidentified
  REGION 1..84: note = Description of Unknown:cds_NZ_WFIY01000004.1_cds_WP_155864380.1_627 target sequence
GLIMGITNPYQISWWITVGLFMINEFGISIILPFFGGIIIWIFAFTTFINRLGNKYAKYVKIFSFIILLAFGLYMIYEGVISLL

SEQ ID NO: 41400 - protein, 85 aa, unidentified
  REGION 1..85: note = Description of Unknown:cds_NZ_WFIY01000004.1_cds_WP_155864380.1_627 target sequence
GAMTADFIFFLITFEVRKFIPENLLVVFYFIGGGLMVFLSYTTLKAKVSNRSKKGNYFTGLIMGITNPYQISWWITVGLFMINEF

SEQ ID NO: 41401 - protein, 85 aa, unidentified
  REGION 1..85: note = Description of Unknown:cds_NZ_WFIY01000004.1_cds_WP_155862942.1_800 target sequence
REFVTYPEKVSEFEFFYLKNIFAYQFGYDIADCVFDDSNYFFIQRSINTNRIRNILIDNNLFLVLRAQDNLFSLTLNSAKKIKIC

SEQ ID NO: 41402 - protein, 85 aa, unidentified
  REGION 1..85: note = Description of Unknown:cds_NZ_WFIY01000004.1_cds_WP_155862942.1_800 target sequence
SKPPRFRVIIPYDIAKVVRYSGNVFAKHVIEVDKSLRAGDQVIVVDSDDNIIAVGRLKLSAEEIIEYKRGVAVIVKERNKNEGNS

SEQ ID NO: 41403 - protein, 84 aa, unidentified
  REGION 1..84: note = Description of Unknown:cds_NZ_WFIY01000004.1_cds_WP_155862942.1_800 target sequence
KPPRFRVIIPYDIAKVVRYSGNVFAKHVIEVDKSLRAGDQVIVVDSDDNIIAVGRLKLSAEEIIEYKRGVAVIVKERNKNEGNS

SEQ ID NO: 41404 - protein, 85 aa, unidentified
  REGION 1..85: note = Description of Unknown:cds_NZ_WFIY01000004.1_cds_WP_155862942.1_800 target sequence
YDIADCVFDDSNYFFIQRSINTNRIRNILIDNNLFLVLRAQDNLFSLTLNSAKKIKICSKPPRFRVIIPYDIAKVVRYSGNVFAK

SEQ ID NO: 41405 - protein, 85 aa, unidentified
  REGION 1..85: note = Description of Unknown:cds_NZ_WFIY01000004.1_cds_WP_155863789.1_1670 target sequence
KLFSGKKFEVYLDKFDLPNGKIRETEYIKHRGSAVIIPLIDENTIILEKQFRPIIGKWIYELPAGTMEEGEAPETTAKRELIEET

SEQ ID NO: 41406 - protein, 85 aa, unidentified
  REGION 1..85: note = Description of Unknown:cds_NZ_WFIY01000004.1_cds_WP_155863789.1_1670 target sequence
GYEAETLIHLIDFYPSPGVSTELMHLFLAKGLKFVGSKPEEYEVIEIEKKNIDEILEMIKNHEIEDAKTIIGILYYQFMLRNRTT

SEQ ID NO: 41407 - protein, 84 aa, unidentified
  REGION 1..84: note = Description of Unknown:cds_NZ_WFIY01000004.1_cds_WP_155863789.1_1670 target sequence
YEAETLIHLIDFYPSPGVSTELMHLFLAKGLKFVGSKPEEYEVIEIEKKNIDEILEMIKNHEIEDAKTIIGILYYQFMLRNRTT

SEQ ID NO: 41408 - protein, 85 aa, unidentified
  REGION 1..85: note = Description of Unknown:cds_NZ_WFIY01000004.1_cds_WP_155863789.1_1670 target sequence
IKHRGSAVIIPLIDENTIILEKQFRPIIGKWIYELPAGTMEEGEAPETTAKRELIEETGYEAETLIHLIDFYPSPGVSTELMHLF

SEQ ID NO: 41409 - protein, 85 aa, unidentified
  REGION 1..85: note = Description of Unknown:cds_NZ_WFIY01000004.1_cds_WP_152942048.1_1829 target sequence
KVTPGSKAPELVNAFIEIPMGSNIKYEYDEEEEVLKVDRILYTSMFYPFNYGFIPGTMSEDGDPLDILVISNYPFNPGTVVEARP

SEQ ID NO: 41410 - protein, 85 aa, unidentified
  REGION 1..85: note = Description of Unknown:cds_NZ_WFIY01000004.1_cds_WP_152942048.1_1829 target sequence
VGLIYMTDEEGVDKKIIAVPKDKVDPTFSNIKDVTDIPDAIKNKLVHFFEHYKELEPGKWVKISGWGTAQEAKEEIKKAIERNHK

SEQ ID NO: 41411 - protein, 84 aa, unidentified
  REGION 1..84: note = Description of Unknown:cds_NZ_WFIY01000004.1_cds_WP_152942048.1_1829 target sequence
GLIYMTDEEGVDKKIIAVPKDKVDPTFSNIKDVTDIPDAIKNKLVHFFEHYKELEPGKWVKISGWGTAQEAKEEIKKAIERNHK

SEQ ID NO: 41412 - protein, 85 aa, unidentified
  REGION 1..85: note = Description of Unknown:cds_NZ_WFIY01000004.1_cds_WP_152942048.1_1829 target sequence
YDEEEEVLKVDRILYTSMFYPFNYGFIPGTMSEDGDPLDILVISNYPFNPGTVVEARPVGLIYMTDEEGVDKKIIAVPKDKVDPT

SEQ ID NO: 41413 - protein, 85 aa, unidentified
  REGION 1..85: note = Description of Unknown:cds_NZ_WFIY01000004.1_cds_WP_155863997.1_1922 target sequence
IRGILLSIGITLISLSLLSITSPISNTIVVTKPYCISIPSTAKVIASIYENSTNVTVYVKVIHDNFTKIIRPPCTIMLTHGKWIF

SEQ ID NO: 41414 - protein, 85 aa, unidentified
  REGION 1..85: note = Description of Unknown:cds_NZ_WFIY01000004.1_cds_WP_155863997.1_1922 target sequence
EVYNETYPKISYRSINETIIEKNITIIIQKTVNCTNIVTTNNATYPIYVRLCIKCMKILKFQELSEILGIIMIISSVFLYLRKRL

SEQ ID NO: 41415 - protein, 84 aa, unidentified
  REGION 1..84: note = Description of Unknown:cds_NZ_WFIY01000004.1_cds_WP_155863997.1_1922 target sequence
VYNETYPKISYRSINETIIEKNITIIIQKTVNCTNIVTTNNATYPIYVRLCIKCMKILKFQELSEILGIIMIISSVFLYLRKRL

SEQ ID NO: 41416 - protein, 85 aa, unidentified
  REGION 1..85: note = Description of Unknown:cds_NZ_WFIY01000004.1_cds_WP_155863997.1_1922 target sequence
IVVTKPYCISIPSTAKVIASIYENSTNVTVYVKVIHDNFTKIIRPPCTIMLTHGKWIFEVYNETYPKISYRSINETIIEKNITII

SEQ ID NO: 41417 - protein, 85 aa, unidentified
  REGION 1..85: note = Description of Unknown:cds_NZ_WFIY01000004.1_cds_WP_155864094.1_2040 target sequence
LSEELVISTIKELYDGRPVAFSKIKRKLKADGEELSLVLEKLEKEGKIRKIESGGGKSFELISQNDDDNKFDLLLKEISEIKDEI

SEQ ID NO: 41418 - protein, 85 aa, unidentified
  REGION 1..85: note = Description of Unknown:cds_NZ_WFIY01000004.1_cds_WP_155864094.1_2040 target sequence
KKLQEAVLEKKKLSENYFDEIYNEVKDNLGYAHLKDIRIEMGLTKEEFYSKLKRHIEENYELIAGGEEGIVKRGSIYGIIIRRKR

SEQ ID NO: 41419 - protein, 84 aa, unidentified
  REGION 1..84: note = Description of Unknown:cds_NZ_WFIY01000004.1_cds_WP_155864094.1_2040 target sequence
KLQEAVLEKKKLSENYFDEIYNEVKDNLGYAHLKDIRIEMGLTKEEFYSKLKRHIEENYELIAGGEEGIVKRGSIYGIIIRRKR

SEQ ID NO: 41420 - protein, 85 aa, unidentified
  REGION 1..85: note = Description of Unknown:cds_NZ_WFIY01000004.1_cds_WP_155864094.1_2040 target sequence
LKADGEELSLVLEKLEKEGKIRKIESGGGKSFELISQNDDDNKFDLLLKEISEIKDEIKKLQEAVLEKKKLSENYFDEIYNEVKD

SEQ ID NO: 41421 - protein, 85 aa, unidentified
  REGION 1..85: note = Description of Unknown:cds_NC_030656.1_cds_YP_009268725.1_10 target sequence
DLLNKAKKNATTFFNRMSHSTQSSSFHRTASLPPKEIVRSKQKVNSLSTDVRCKSSTLPKNTSSSFAEFSCAQKCDEPIYDKVTE

SEQ ID NO: 41422 - protein, 85 aa, unidentified
  REGION 1..85: note = Description of Unknown:cds_NC_030656.1_cds_YP_009268725.1_10 target sequence
DDDDEQDSEDEVWSDAILELINTLTKQRFELLSTLEHYLREDIKILETSAKKLRSSRRNYNHNIKPITEPNVLKRTRSFNSLANI

SEQ ID NO: 41423 - protein, 84 aa, unidentified
  REGION 1..84: note = Description of Unknown:cds_NC_030656.1_cds_YP_009268725.1_10 target sequence
DDDEQDSEDEVWSDAILELINTLTKQRFELLSTLEHYLREDIKILETSAKKLRSSRRNYNHNIKPITEPNVLKRTRSFNSLANI

SEQ ID NO: 41424 - protein, 85 aa, unidentified
  REGION 1..85: note = Description of Unknown:cds_NC_030656.1_cds_YP_009268725.1_10 target sequence
RTASLPPKEIVRSKQKVNSLSTDVRCKSSTLPKNTSSSFAEFSCAQKCDEPIYDKVTEDDDDEQDSEDEVWSDAILELINTLTKQ

SEQ ID NO: 41425 - protein, 85 aa, unidentified
  REGION 1..85: note = Description of Unknown:cds_NC_030656.1_cds_YP_009268790.1_75 target sequence
DKKSLYEDLLMKSTNVIPVQAPKNITKITNYIYLGNFNNVLNMHLYGINFKYTLNLTTSTYTPTIPGVTVFNIPIKDDNVTDVTK

SEQ ID NO: 41426 - protein, 85 aa, unidentified
  REGION 1..85: note = Description of Unknown:cds_NC_030656.1_cds_YP_009268790.1_75 target sequence
YFDDVTGFLQKCEERKMPVLVHCVAGVNRSGVMIMAYLMSQKPLNVPSFVYFLYVYHSLKEKRSAFLENASFKKQVIKYYVTDKL

SEQ ID NO: 41427 - protein, 84 aa, unidentified
  REGION 1..84: note = Description of Unknown:cds_NC_030656.1_cds_YP_009268790.1_75 target sequence
FDDVTGFLQKCEERKMPVLVHCVAGVNRSGVMIMAYLMSQKPLNVPSFVYFLYVYHSLKEKRSAFLENASFKKQVIKYYVTDKL

SEQ ID NO: 41428 - protein, 85 aa, unidentified
  REGION 1..85: note = Description of Unknown:cds_NC_030656.1_cds_YP_009268790.1_75 target sequence
ITNYIYLGNFNNVLNMHLYGINFKYTLNLTTSTYTPTIPGVTVFNIPIKDDNVTDVTKYFDDVTGFLQKCEERKMPVLVHCVAGV

SEQ ID NO: 41429 - protein, 85 aa, unidentified
  REGION 1..85: note = Description of Unknown:cds_NZ_WFIY01000004.1_cds_WP_155862949.1_808 target sequence
QCPYCGSNDLIWDNIHGNIVCASCGSVIDTLYDYSQIDTSEDIIDLNKNLSERKETRNFIKLTETVSNKFRIINNKKNMKFITED

SEQ ID NO: 41430 - protein, 84 aa, unidentified
  REGION 1..84: note = Description of Unknown:cds_NZ_WFIY01000004.1_cds_WP_155862949.1_808 target sequence
GELALSLLNMDKKVYKVYEYLEKNGIFCGRKIKIRVALSFYIAGYRCKKMRNILEKLHINEKYFRKITYKLPKELKYMNKELLD

SEQ ID NO: 41431 - protein, 85 aa, unidentified
  REGION 1..85: note = Description of Unknown:cds_NZ_WFIY01000004.1_cds_WP_155862949.1_808 target sequence
IDTLYDYSQIDTSEDIIDLNKNLSERKETRNFIKLTETVSNKFRIINNKKNMKFITEDGELALSLLNMDKKVYKVYEYLEKNGIF

SEQ ID NO: 41432 - protein, 85 aa, unidentified
  REGION 1..85: note = Description of Unknown:cds_NZ_WFIY01000004.1_cds_WP_013775348.1_1064 target sequence
TDQILLTGNLKEAARKAAQWLANRKPIRDLRDWGTAFSLWPPHFTTSCCGAEFGAFAAARFDAERFGMLPFSSSRQSNILVIEGT

SEQ ID NO: 41433 - protein, 84 aa, unidentified
  REGION 1..84: note = Description of Unknown:cds_NZ_WFIY01000004.1_cds_WP_013775348.1_1064 target sequence
MTRKMARAARIVYEQMPEPKYVMAIGACSLEGGIFWNSYNTVLPSEVGIPVDIYVPGCPIRPEAIARGLLMLQKKIRHQSTIKM

SEQ ID NO: 41434 - protein, 85 aa, unidentified
  REGION 1..85: note = Description of Unknown:cds_NZ_WFIY01000004.1_cds_WP_013775348.1_1064 target sequence
RDLRDWGTAFSLWPPHFTTSCCGAEFGAFAAARFDAERFGMLPFSSSRQSNILVIEGTMTRKMARAARIVYEQMPEPKYVMAIGA

SEQ ID NO: 41435 - protein, 85 aa, unidentified
  REGION 1..85: note = Description of Unknown:cds_NZ_WFIY01000004.1_cds_WP_155863330.1_1296 target sequence
KKLVYFYIVYLLFFFLFVLFYDLSAFLTVSSFPVPSFLFYTPLTREIFLGVQFVGIPLLFLFFFFVSGKDYVIGLLVGYFIVLFI

SEQ ID NO: 41436 - protein, 84 aa, unidentified
  REGION 1..84: note = Description of Unknown:cds_NZ_WFIY01000004.1_cds_WP_155863330.1_1296 target sequence
FYFLPNIFIFSILSLIGLGLFVSVIPSLTSRLSKVLWGISSLYFIMIMVNAYFSLQFYPLFIIPSIIASGIEMIKLISRDCRSS

SEQ ID NO: 41437 - protein, 85 aa, unidentified
  REGION 1..85: note = Description of Unknown:cds_NZ_WFIY01000004.1_cds_WP_155863330.1_1296 target sequence
TVSSFPVPSFLFYTPLTREIFLGVQFVGIPLLFLFFFFVSGKDYVIGLLVGYFIVLFIFYFLPNIFIFSILSLIGLGLFVSVIPS

SEQ ID NO: 41438 - protein, 85 aa, unidentified
  REGION 1..85: note = Description of Unknown:cds_NZ_WFIY01000004.1_cds_WP_155863379.1_1352 target sequence
VMKMEKEAIVALLAFLIATGMTLGLYQIDFQGLGHLTNWSKTVGYCLEGTKLFTNGTLFLQISRVDGPDTYGGFIVLVQVLYPNG

SEQ ID NO: 41439 - protein, 84 aa, unidentified
  REGION 1..84: note = Description of Unknown:cds_NZ_WFIY01000004.1_cds_WP_155863379.1_1352 target sequence
TVVYQWNANQLGHIPKSDIHNEFSLHPAHSTGFALCVPLGQNATVMLNMPFHIPPGTYIVKVYDANGANAAYGQKWEIEVQAES

SEQ ID NO: 41440 - protein, 85 aa, unidentified
  REGION 1..85: note = Description of Unknown:cds_NZ_WFIY01000004.1_cds_WP_155863379.1_1352 target sequence
IDFQGLGHLTNWSKTVGYCLEGTKLFTNGTLFLQISRVDGPDTYGGFIVLVQVLYPNGTVVYQWNANQLGHIPKSDIHNEFSLHP

SEQ ID NO: 41441 - protein, 85 aa, unidentified
  REGION 1..85: note = Description of Unknown:cds_NZ_WFIY01000004.1_cds_WP_155863891.1_1797 target sequence
PSKKKGDIFDYFDEIIRQMEEEFEELEKEFFKAAGKGEVKTFGPYVYGFSMTIGPDGKPIIEEFGNVKRLGSKPILSEEREPLVD

SEQ ID NO: 41442 - protein, 84 aa, unidentified
  REGION 1..84: note = Description of Unknown:cds_NZ_WFIY01000004.1_cds_WP_155863891.1_1797 target sequence
VIEKGDEIRVVAEVPGVDKNNIKVRLNGKTLILSAQEGDKKYYKEIELPTEVDENSVKATYKNGVLEVVFKKAKVESGKEIKIE

SEQ ID NO: 41443 - protein, 85 aa, unidentified
  REGION 1..85: note = Description of Unknown:cds_NZ_WFIY01000004.1_cds_WP_155863891.1_1797 target sequence
KEFFKAAGKGEVKTFGPYVYGFSMTIGPDGKPIIEEFGNVKRLGSKPILSEEREPLVDVIEKGDEIRVVAEVPGVDKNNIKVRLN

SEQ ID NO: 41444 - protein, 85 aa, unidentified
  REGION 1..85: note = Description of Unknown:cds_NC_035460.1_cds_YP_009408040.1_89 target sequence
STFIKHVYLPITLDPHELTLDIIPNIKNAILKTYLHRESGGIMAKKIDICKDSELPLGELINNHILINVPCEVTYKYYKNGDIVQ

SEQ ID NO: 41445 - protein, 84 aa, unidentified
  REGION 1..84: note = Description of Unknown:cds_NC_035460.1_cds_YP_009408040.1_89 target sequence
GTINIEDENNVTVVCGDLICKLGKDSGSISFSDSKYCFIRNTKVYENGTNVTAILKEQQQGMDSYFIFLGSLIEEPTKSENATN

SEQ ID NO: 41446 - protein, 85 aa, unidentified
  REGION 1..85: note = Description of Unknown:cds_NC_035460.1_cds_YP_009408040.1_89 target sequence
NAILKTYLHRESGGIMAKKIDICKDSELPLGELINNHILINVPCEVTYKYYKNGDIVQGTINIEDENNVTVVCGDLICKLGKDSG

SEQ ID NO: 41447 - protein, 85 aa, unidentified
  REGION 1..85: note = Description of Unknown:cds_NC_035460.1_cds_YP_009408059.1_108 target sequence
ADKNIVRSSYDDYYETIKKLSPQLKTILAHINSEQTQHRVVDTTSTVTGGSCPPRKKCSSKPCKTSKKMTSSGCTSAVKRKTMYN

SEQ ID NO: 41448 - protein, 84 aa, unidentified
  REGION 1..84: note = Description of Unknown:cds_NC_035460.1_cds_YP_009408059.1_108 target sequence
NTNEPQIMQAVTNAGKIVYGTIKDGKLEVQGTVGEIDHDLLGVNFVNGGKKPSMTKKPKSTSISSTKSKKMSKSKDCCPTSGMD

SEQ ID NO: 41449 - protein, 85 aa, unidentified
  REGION 1..85: note = Description of Unknown:cds_NC_035460.1_cds_YP_009408059.1_108 target sequence
LAHINSEQTQHRVVDTTSTVTGGSCPPRKKCSSKPCKTSKKMTSSGCTSAVKRKTMYNNTNEPQIMQAVTNAGKIVYGTIKDGKL

SEQ ID NO: 41450 - protein, 85 aa, unidentified
  REGION 1..85: note = Description of Unknown:cds_NC_007409.1_cds_YP_319896.1_65 target sequence
LVDYKKVYLLNISIRRFTKRRSMTKYEEDKKIRIIEEYFDGNEDIPPRLSFLISGISVSTRLFRLLYPHKMSQVPSVLEEVKKYL

SEQ ID NO: 41451 - protein, 85 aa, unidentified
  REGION 1..85: note = Description of Unknown:cds_NC_007409.1_cds_YP_319896.1_65 target sequence
NGRNGIEVVLDYFPLYLPKPILLGLLNEALLKKKARYNQIRNDPFKSEYDKQRALAMLEESLKDIQIFIEYLKKEDGLQSIQKLA

SEQ ID NO: 41452 - protein, 84 aa, unidentified
  REGION 1..84: note = Description of Unknown:cds_NC_007409.1_cds_YP_319896.1_65 target sequence
GRNGIEVVLDYFPLYLPKPILLGLLNEALLKKKARYNQIRNDPFKSEYDKQRALAMLEESLKDIQIFIEYLKKEDGLQSIQKLA

SEQ ID NO: 41453 - protein, 85 aa, unidentified
  REGION 1..85: note = Description of Unknown:cds_NC_007409.1_cds_YP_319896.1_65 target sequence
EDKKIRIIEEYFDGNEDIPPRLSFLISGISVSTRLFRLLYPHKMSQVPSVLEEVKKYLNGRNGIEVVLDYFPLYLPKPILLGLLN

SEQ ID NO: 41454 - protein, 85 aa, unidentified
  REGION 1..85: note = Description of Unknown:hvTR_Q98270 target sequence
AAPRRISLPSVTISAPRAVLRQERQEPLSCVLPEYYYTVAQLRLQVNSERARCWFCSQAVGAAAWAIETLHGHAVGSFCSRICRD

SEQ ID NO: 41455 - protein, 84 aa, unidentified
  REGION 1..84: note = Description of Unknown:hvTR_Q98270 target sequence
DSFASTVRTHVALREEPKVTLLPLVFFQHPEKVLELIRSLRSREGIYGTCFFDERAGAVTLTLRSLHEQDETAGGVFNDARDSK

SEQ ID NO: 41456 - protein, 85 aa, unidentified
  REGION 1..85: note = Description of Unknown:hvTR_Q98270 target sequence
LSCVLPEYYYTVAQLRLQVNSERARCWFCSQAVGAAAWAIETLHGHAVGSFCSRICRDSFASTVRTHVALREEPKVTLLPLVFFQ

SEQ ID NO: 41457 - protein, 85 aa, unidentified
  REGION 1..85: note = Description of Unknown:cds_NZ_WFIY01000004.1_cds_WP_013775450.1_963 target sequence
EQATSNKSTNSFLIRNVRMDDIDDIIMINRLSLPENYPYYFFVDHIKDYGKAFYVAEVNGDVVGYIMPRIELGFSNLKNLPSLVK

SEQ ID NO: 41458 - protein, 84 aa, unidentified
  REGION 1..84: note = Description of Unknown:cds_NZ_WFIY01000004.1_cds_WP_013775450.1_963 target sequence
KKGHVVSIAVLEAYRNRGIGTALLKASMKSMKEDYGAEEVYLEVRVSNYPAISVYEKLGFMKIKVLKHYYADGEDAYLMATYLT

SEQ ID NO: 41459 - protein, 85 aa, unidentified
  REGION 1..85: note = Description of Unknown:cds_NZ_WFIY01000004.1_cds_WP_013775450.1_963 target sequence
INRLSLPENYPYYFFVDHIKDYGKAFYVAEVNGDVVGYIMPRIELGFSNLKNLPSLVKKGHVVSIAVLEAYRNRGIGTALLKASM

SEQ ID NO: 41460 - protein, 85 aa, unidentified
  REGION 1..85: note = Description of Unknown:cds_NZ_WFIY01000004.1_cds_WP_155863199.1_1138 target sequence
KLRTHYVFSLGLLSLLDSLLLSNSLEVIIISGIISVTANNVIDYLGHEIKGKYISRTPRTHTLPRSIGWGLLTTVPIIVALYFLS

SEQ ID NO: 41461 - protein, 84 aa, unidentified
  REGION 1..84: note = Description of Unknown:cds_NZ_WFIY01000004.1_cds_WP_155863199.1_1138 target sequence
SSTELILITILDGIIVGPSHMLLDIFTERGIYHKINGRWRRIALAHFSYDNPAVNGLAILLGVLMLFAALHHYYYDYHYYHYYS

SEQ ID NO: 41462 - protein, 85 aa, unidentified
  REGION 1..85: note = Description of Unknown:cds_NZ_WFIY01000004.1_cds_WP_155863199.1_1138 target sequence
IIISGIISVTANNVIDYLGHEIKGKYISRTPRTHTLPRSIGWGLLTTVPIIVALYFLSSTELILITILDGIIVGPSHMLLDIFTE

SEQ ID NO: 41463 - protein, 85 aa, unidentified
  REGION 1..85: note = Description of Unknown:cds_NZ_WFIY01000004.1_cds_WP_205737160.1_1210 target sequence
GKIKEHAELSWFIVMMILVAVFVAWNIRGIISGSSTSYRYGLPLLSGMPKDAQTAVKYFDSHPPVNSSCEVINGILVVNMTVTQP

SEQ ID NO: 41464 - protein, 84 aa, unidentified
  REGION 1..84: note = Description of Unknown:cds_NZ_WFIY01000004.1_cds_WP_205737160.1_1210 target sequence
PDGFHPDVIKAKPNEPIVIILNSPQVITGFFLRLPDGVVNVNAVPGYVSYVYFVAPSSPGNYTWREPEYACYNYSYWTGTLEVS

SEQ ID NO: 41465 - protein, 85 aa, unidentified
  REGION 1..85: note = Description of Unknown:cds_NZ_WFIY01000004.1_cds_WP_205737160.1_1210 target sequence
RGIISGSSTSYRYGLPLLSGMPKDAQTAVKYFDSHPPVNSSCEVINGILVVNMTVTQPDGFHPDVIKAKPNEPIVIILNSPQVIT

SEQ ID NO: 41466 - protein, 85 aa, unidentified
  REGION 1..85: note = Description of Unknown:cds_NZ_WFIY01000004.1_cds_1438 target sequence
YLELLRERRRLFKKLTRRLLHLYRNLASHLIETLHELGVSTIYLGYPFNIVQEKGNKFTVNMWSYRKLMESIELKAQEYGMKVYE

SEQ ID NO: 41467 - protein, 84 aa, unidentified
  REGION 1..84: note = Description of Unknown:cds_NZ_WFIY01000004.1_cds_1438 target sequence
VVEYNTSKYCAYHDVEVKRNPRGVIICPKGHKLHSDLNGALNILKKAVGVIVNAVKKPLSFIVDHNRVAPIKGGVTPKTSGNPR

SEQ ID NO: 41468 - protein, 85 aa, unidentified
  REGION 1..85: note = Description of Unknown:cds_NZ_WFIY01000004.1_cds_1438 target sequence
SHLIETLHELGVSTIYLGYPFNIVQEKGNKFTVNMWSYRKLMESIELKAQEYGMKVYEVVEYNTSKYCAYHDVEVKRNPRGVIIC

SEQ ID NO: 41469 - protein, 85 aa, unidentified
  REGION 1..85: note = Description of Unknown:cds_NZ_WFIY01000004.1_cds_WP_155864458.1_1699 target sequence
LVSVGSKNRTKVEAVKEALDIIGLKAEIVAMEVDSGVSSQPYCKETLFGARNRAIRALRTANADIGIGIEGGICFEYNKVLAFAV

SEQ ID NO: 41470 - protein, 84 aa, unidentified
  REGION 1..84: note = Description of Unknown:cds_NZ_WFIY01000004.1_cds_WP_155864458.1_1699 target sequence
VVYAVDKEGNENFSKSAAFTLPSKVVKYINQGFELGYAVDKAYSKSGSKYSEGAVGILTKYIDRKRLYVDPVILALYPFYNKNI

SEQ ID NO: 41471 - protein, 85 aa, unidentified
  REGION 1..85: note = Description of Unknown:cds_NZ_WFIY01000004.1_cds_WP_155864458.1_1699 target sequence
IVAMEVDSGVSSQPYCKETLFGARNRAIRALRTANADIGIGIEGGICFEYNKVLAFAVVYAVDKEGNENFSKSAAFTLPSKVVKY

SEQ ID NO: 41472 - protein, 85 aa, unidentified
  REGION 1..85: note = Description of Unknown:cds_NC_035460.1_cds_YP_009407963.1_12 target sequence
ASSDVKTEALPNIGDVVKGTVFVEDGFVYARMDKYNTTTLILNYCDINKQAFDKITTNLIGKSIYLQVKHVDYNKKYIDSVHIHK

SEQ ID NO: 41473 - protein, 84 aa, unidentified
  REGION 1..84: note = Description of Unknown:cds_NC_035460.1_cds_YP_009407963.1_12 target sequence
KKKKKEKVNELEQIKQIKIQHLLQTGIGYITEAINNLQDSNKKNDTVNIIKTNCVDIDINKFKTFNTHKFIVGDMLFTFQQIEK

SEQ ID NO: 41474 - protein, 85 aa, unidentified
  REGION 1..85: note = Description of Unknown:cds_NC_035460.1_cds_YP_009407963.1_12 target sequence
VYARMDKYNTTTLILNYCDINKQAFDKITTNLIGKSIYLQVKHVDYNKKYIDSVHIHKKKKKEKVNELEQIKQIKIQHLLQTGIG

SEQ ID NO: 41475 - protein, 85 aa, unidentified
  REGION 1..85: note = Description of Unknown:cds_NC_035460.1_cds_YP_009408052.1_101 target sequence
ADSGDIIDYVSEEDDDSEYSITEDENEDSSLDSPETSDFVSYKPSNINFESNSIHIEEDIPQYKNISAKISALKRRYTRRISLIE

SEQ ID NO: 41476 - protein, 84 aa, unidentified
  REGION 1..84: note = Description of Unknown:cds_NC_035460.1_cds_YP_009408052.1_101 target sequence
EITGIIAESFNLLQRGRLPLVQNLSNDTLKQKMLHIIIQEIKEGTCPIIIEKNGELLSINDFDKKGIDTHIEYITNIWKLQNRY

SEQ ID NO: 41477 - protein, 85 aa, unidentified
  REGION 1..85: note = Description of Unknown:cds_NC_035460.1_cds_YP_009408052.1_101 target sequence
DSSLDSPETSDFVSYKPSNINFESNSIHIEEDIPQYKNISAKISALKRRYTRRISLIEITGIIAESFNLLQRGRLPLVQNLSNDT

SEQ ID NO: 41478 - protein, 85 aa, unidentified
  REGION 1..85: note = Description of Unknown:vpeps_3UXU_1 target sequence
NADIYIPTLEEIKRTLQLAKDYSENVYFIYRIALESGVRLSEVLKVLKEPERDICGNDVCYYPLSWTRGYKGVFYVFHITPLKRV

SEQ ID NO: 41479 - protein, 85 aa, unidentified
  REGION 1..85: note = Description of Unknown:vpeps_3UXU_1 target sequence
VEVTKWAIADFERRHKDAIAIKYFRKFVASKMAELSVPLDIIDFIQGRKPARVLTQHYVSLFGIAKEQYKKYAEWLKGVHHHHHH

SEQ ID NO: 41480 - protein, 85 aa, unidentified
  REGION 1..85: note = Description of Unknown:vpeps_3UXU_1 target sequence
FIYRIALESGVRLSEVLKVLKEPERDICGNDVCYYPLSWTRGYKGVFYVFHITPLKRVEVTKWAIADFERRHKDAIAIKYFRKFV

SEQ ID NO: 41481 - protein, 85 aa, unidentified
  REGION 1..85: note = Description of Unknown:cds_NZ_WFIY01000004.1_cds_WP_155862540.1_306 target sequence
PKKTIKIVVEGGNVKPGPPLGPTLSQLKLNVGEVVKKINEATAQFKGMTVPVTIDVDLDTKEFEISVGIPTTSSLLLKKAGAEAP

SEQ ID NO: 41482 - protein, 84 aa, unidentified
  REGION 1..84: note = Description of Unknown:cds_NZ_WFIY01000004.1_cds_WP_155862540.1_306 target sequence
APSGDPAHKKIGNVSLEDIIDVAITKKPSLTAKTLKAAVKSILGTARQIGLTVDKKDPKELINEIDEGKYDELFSKYEEKWNKA

SEQ ID NO: 41483 - protein, 85 aa, unidentified
  REGION 1..85: note = Description of Unknown:cds_NZ_WFIY01000004.1_cds_WP_155862540.1_306 target sequence
KLNVGEVVKKINEATAQFKGMTVPVTIDVDLDTKEFEISVGIPTTSSLLLKKAGAEAPSGDPAHKKIGNVSLEDIIDVAITKKPS

SEQ ID NO: 41484 - protein, 85 aa, unidentified
  REGION 1..85: note = Description of Unknown:cds_NZ_WFIY01000004.1_cds_WP_155862587.1_360 target sequence
PGSGKTLFANILREKGFYVISMGDVLRKRYEKEAKIGERMMDFAKRIREIYGEGVVARLSMEEITPTMSRIAFEGVRSLAEVDEF

SEQ ID NO: 41485 - protein, 84 aa, unidentified
  REGION 1..84: note = Description of Unknown:cds_NZ_WFIY01000004.1_cds_WP_155862587.1_360 target sequence
EFRRLGNPIIIAIHSPPSLRYQRMISRMRPDDSKNIEDLRRRDLDEIRLGIGGVIALADYIIINDSTIDEFKKRAEEIILRITK

SEQ ID NO: 41486 - protein, 85 aa, unidentified
  REGION 1..85: note = Description of Unknown:cds_NZ_WFIY01000004.1_cds_WP_155862587.1_360 target sequence
KRYEKEAKIGERMMDFAKRIREIYGEGVVARLSMEEITPTMSRIAFEGVRSLAEVDEFRRLGNPIIIAIHSPPSLRYQRMISRMR

SEQ ID NO: 41487 - protein, 85 aa, unidentified
  REGION 1..85: note = Description of Unknown:cds_NZ_WFIY01000004.1_cds_WP_155863050.1_946 target sequence
SESFKYIVRLFGQDVDGTMKVPYALAMVKGIGYNTARAIVRQLGIDKDRRLGELSDSELKKIEEALSDKTIKGLPSWMLNRRKDY

SEQ ID NO: 41488 - protein, 84 aa, unidentified
  REGION 1..84: note = Description of Unknown:cds_NZ_WFIY01000004.1_cds_WP_155863050.1_946 target sequence
DYESGLDLHLVTSELIFYARNDIEREKKIKSWRGVRHALGLKVRGQRTRTTGRTGTTVGVKRAKAAQPAGGGQAQSSQSSQAKK

SEQ ID NO: 41489 - protein, 85 aa, unidentified
  REGION 1..85: note = Description of Unknown:cds_NZ_WFIY01000004.1_cds_WP_155863050.1_946 target sequence
VKGIGYNTARAIVRQLGIDKDRRLGELSDSELKKIEEALSDKTIKGLPSWMLNRRKDYESGLDLHLVTSELIFYARNDIEREKKI

SEQ ID NO: 41490 - protein, 85 aa, unidentified
  REGION 1..85: note = Description of Unknown:cds_NZ_WFIY01000004.1_cds_WP_155863070.1_976 target sequence
KIPLDYLCVKSGLLCNRCQSLVDSGEVDSFEVKVMQALLELEETQFKELKDSTYYKAIKVNDLLILLVGSGPSMTIQKWIKVAKA

SEQ ID NO: 41491 - protein, 84 aa, unidentified
  REGION 1..84: note = Description of Unknown:cds_NZ_WFIY01000004.1_cds_WP_155863070.1_976 target sequence
KALQDKLHMKVRIIEKTNNIKNSAIQLLSPARVLGVNTVWLPDGSVQYVIRVSKSERKLLPADSNILESALSKIHDTRVKIRVE

SEQ ID NO: 41492 - protein, 85 aa, unidentified
  REGION 1..85: note = Description of Unknown:cds_NZ_WFIY01000004.1_cds_WP_155863070.1_976 target sequence
DSFEVKVMQALLELEETQFKELKDSTYYKAIKVNDLLILLVGSGPSMTIQKWIKVAKALQDKLHMKVRIIEKTNNIKNSAIQLLS

SEQ ID NO: 41493 - protein, 85 aa, unidentified
  REGION 1..85: note = Description of Unknown:cds_NZ_WFIY01000004.1_cds_WP_155863227.1_1174 target sequence
ANLTLFKALLLIGFEKVAPRTLKRGDVTITVTFIPNVRWIVRLPHITYELSTQKEVLHKLVNEGIISRKELEYLASIGLDIAKEE

SEQ ID NO: 41494 - protein, 84 aa, unidentified
  REGION 1..84: note = Description of Unknown:cds_NZ_WFIY01000004.1_cds_WP_155863227.1_1174 target sequence
EEIVQSEEITTGSLIDVRRAFITQVIMPRLEILLRTNGMKCPVCGKRFKSTTEFYNHLNTTEVRAEEHKKILESIYEEVTGIKP

SEQ ID NO: 41495 - protein, 85 aa, unidentified
  REGION 1..85: note = Description of Unknown:cds_NZ_WFIY01000004.1_cds_WP_155863227.1_1174 target sequence
TITVTFIPNVRWIVRLPHITYELSTQKEVLHKLVNEGIISRKELEYLASIGLDIAKEEIVQSEEITTGSLIDVRRAFITQVIMPR

SEQ ID NO: 41496 - protein, 85 aa, unidentified
  REGION 1..85: note = Description of Unknown:cds_NZ_WFIY01000004.1_cds_1288 target sequence
NIGKYEAYLELLRERRRLFKKLTRRLLHLYRNLASHLIKTLYELGVSTIYLGYPFNIVKEKGNKFTVNIWSYCKLMESIELKAQE

SEQ ID NO: 41497 - protein, 84 aa, unidentified
  REGION 1..84: note = Description of Unknown:cds_NZ_WFIY01000004.1_cds_1288 target sequence
EYGMKVYEVVEYNTSKYCAYHDVEVKRSPRGVIICPKGHKLHSDLNGALNILKKALGVIAEAVKKPLSFVVDHNRVAPIKGCNP

SEQ ID NO: 41498 - protein, 85 aa, unidentified
  REGION 1..85: note = Description of Unknown:cds_NZ_WFIY01000004.1_cds_1288 target sequence
HLYRNLASHLIKTLYELGVSTIYLGYPFNIVKEKGNKFTVNIWSYCKLMESIELKAQEYGMKVYEVVEYNTSKYCAYHDVEVKRS

SEQ ID NO: 41499 - protein, 85 aa, unidentified
  REGION 1..85: note = Description of Unknown:cds_NZ_WFIY01000004.1_cds_WP_155863375.1_1348 target sequence
ISRNLFKGNLVSMIASIFILYLLILLDIYGINYAFSRIVQIIMWIIWILSFPSYLSYNSSLLEKRKILEYLAPIAIIITLIGLIF

SEQ ID NO: 41500 - protein, 84 aa, unidentified
  REGION 1..84: note = Description of Unknown:cds_NZ_WFIY01000004.1_cds_WP_155863375.1_1348 target sequence
IFLALGKFIGIELIVFGYIFEPIAGISIFLTLKKISVLFSSLFFYGAIIFTAGLPLFLFNLGIISIIGDIIKMVGLSYFIYKFK

SEQ ID NO: 41501 - protein, 85 aa, unidentified
  REGION 1..85: note = Description of Unknown:cds_NZ_WFIY01000004.1_cds_WP_155863375.1_1348 target sequence
IYGINYAFSRIVQIIMWIIWILSFPSYLSYNSSLLEKRKILEYLAPIAIIITLIGLIFLALGKFIGIELIVFGYIFEPIAGISIF

SEQ ID NO: 41502 - protein, 85 aa, unidentified
  REGION 1..85: note = Description of Unknown:cds_NZ_WFIY01000004.1_cds_WP_155863464.1_1427 target sequence
SIDNDEDYIEGMKKLKEIVIYLNSTGLLDSILDLLKDENKIMSFLRSKSFRAIVELLGDLKEMIDSGQVSSEDFINGTLAIAKHL

SEQ ID NO: 41503 - protein, 84 aa, unidentified
  REGION 1..84: note = Description of Unknown:cds_NZ_WFIY01000004.1_cds_WP_155863464.1_1427 target sequence
HLDKIGKILSTLEQHGVLDVITSGLSRAAEAMVKEGDQSNIVELLASFDDPDVKKTLAYLRFMLKELGKAATPIVENDGKSQQK

SEQ ID NO: 41504 - protein, 85 aa, unidentified
  REGION 1..85: note = Description of Unknown:cds_NZ_WFIY01000004.1_cds_WP_155863464.1_1427 target sequence
LDSILDLLKDENKIMSFLRSKSFRAIVELLGDLKEMIDSGQVSSEDFINGTLAIAKHLDKIGKILSTLEQHGVLDVITSGLSRAA

SEQ ID NO: 41505 - protein, 85 aa, unidentified
  REGION 1..85: note = Description of Unknown:cds_NZ_WFIY01000004.1_cds_WP_155863663.1_1540 target sequence
ERVTIIGIIFSILVVGWILATGQWAYGNVVGPLVNHSKIPLLKITYVSAYENSKGTYLILNITDCCGPDAYPASAPIMEICNSTW

SEQ ID NO: 41506 - protein, 84 aa, unidentified
  REGION 1..84: note = Description of Unknown:cds_NZ_WFIY01000004.1_cds_WP_155863663.1_1540 target sequence
TWHVFLYSYNISNDTVKVIQAPWNENKKDYTNWYSGFVVILGSEAQFQLQLPFHLSPGTYHIKLFTPAVSSKVLAKQTATFTIS

SEQ ID NO: 41507 - protein, 85 aa, unidentified
  REGION 1..85: note = Description of Unknown:cds_NZ_WFIY01000004.1_cds_WP_155863663.1_1540 target sequence
NVVGPLVNHSKIPLLKITYVSAYENSKGTYLILNITDCCGPDAYPASAPIMEICNSTWHVFLYSYNISNDTVKVIQAPWNENKKD

SEQ ID NO: 41508 - protein, 85 aa, unidentified
  REGION 1..85: note = Description of Unknown:cds_NZ_WFIY01000004.1_cds_WP_155863851.1_1747 target sequence
VTDTYELIKSLTEAKERIIDGYVKQGIELIEKTVSSNNISQANWVICNIIDAAKCEYLVEVLDSIGKIFDISVCGNVKRVISCYA

SEQ ID NO: 41509 - protein, 84 aa, unidentified
  REGION 1..84: note = Description of Unknown:cds_NZ_WFIY01000004.1_cds_WP_155863851.1_1747 target sequence
YAKVGRYSEFVDIAINSIVNRGKKDQLDKVLNDVGNNGEFLYKLSLAYEKLHDLKKAQELRKKACDSGIPEACENINQVSPSYS

SEQ ID NO: 41510 - protein, 85 aa, unidentified
  REGION 1..85: note = Description of Unknown:cds_NZ_WFIY01000004.1_cds_WP_155863851.1_1747 target sequence
ELIEKTVSSNNISQANWVICNIIDAAKCEYLVEVLDSIGKIFDISVCGNVKRVISCYAKVGRYSEFVDIAINSIVNRGKKDQLDK

SEQ ID NO: 41511 - protein, 85 aa, unidentified
  REGION 1..85: note = Description of Unknown:cds_NZ_WFIY01000004.1_cds_WP_155864326.1_2331 target sequence
KNLNKASNDAKKLITQYRCFYEKEILICEGGGKDNICKRAKEISEILNLKNIDFQVYILLDGDAKNINCNIGWMFYLNEKNLDEL

SEQ ID NO: 41512 - protein, 84 aa, unidentified
  REGION 1..84: note = Description of Unknown:cds_NZ_WFIY01000004.1_cds_WP_155864326.1_2331 target sequence
ELIFVTAKEVLSKFTHAKQLLENEENSDSKLKTYLVMYLFKKHLAQNETWTDLSSFSFYVAVNFKQYVLSRDQNLCNLIKLLDS

SEQ ID NO: 41513 - protein, 85 aa, unidentified
  REGION 1..85: note = Description of Unknown:cds_NZ_WFIY01000004.1_cds_WP_155864326.1_2331 target sequence
CEGGGKDNICKRAKEISEILNLKNIDFQVYILLDGDAKNINCNIGWMFYLNEKNLDELIFVTAKEVLSKFTHAKQLLENEENSDS

SEQ ID NO: 41514 - protein, 85 aa, unidentified
  REGION 1..85: note = Description of Unknown:cds_NC_024711.1_cds_YP_009052533.1_55 target sequence
EDDKRVNYKLDAINKLINNLKLSISGNKEHDELGENNVIVNLDEISQKITELHEMIKAEFDEFENQHKSESDETQTLLTEKFDLI

SEQ ID NO: 41515 - protein, 84 aa, unidentified
  REGION 1..84: note = Description of Unknown:cds_NC_024711.1_cds_YP_009052533.1_55 target sequence
DLIHSDLATISDKLTTIDTNIKNMSSALQGKFNALIAAVNDMKASNDTKNDAIIAALQGLVTQVNRNTSNINSLDGRVDALEQA

SEQ ID NO: 41516 - protein, 85 aa, unidentified
  REGION 1..85: note = Description of Unknown:cds_NC_024711.1_cds_YP_009052533.1_55 target sequence
KEHDELGENNVIVNLDEISQKITELHEMIKAEFDEFENQHKSESDETQTLLTEKFDLIHSDLATISDKLTTIDTNIKNMSSALQG

SEQ ID NO: 41517 - protein, 85 aa, unidentified
  REGION 1..85: note = Description of Unknown:cds_NZ_WFIY01000004.1_cds_WP_155862442.1_191 target sequence
VPYSQGKFCFPLEVKEVRKGDVIVVKPTSVKSNGIQLVLPSLSLISDSCNRKIDSLIWVDGVRIHGNEEIIFDGGKLKVQGKIKV

SEQ ID NO: 41518 - protein, 84 aa, unidentified
  REGION 1..84: note = Description of Unknown:cds_NZ_WFIY01000004.1_cds_WP_155862442.1_191 target sequence
KVESPEFLPGYTLKKILDNKEILINSLGVDGIPIISIDNYPLIYIKRDTNGNIKIHVNSVNNPILELASLSLYYYISSEYSEEI

SEQ ID NO: 41519 - protein, 85 aa, unidentified
  REGION 1..85: note = Description of Unknown:cds_NZ_WFIY01000004.1_cds_WP_155862442.1_191 target sequence
TSVKSNGIQLVLPSLSLISDSCNRKIDSLIWVDGVRIHGNEEIIFDGGKLKVQGKIKVESPEFLPGYTLKKILDNKEILINSLGV

SEQ ID NO: 41520 - protein, 85 aa, unidentified
  REGION 1..85: note = Description of Unknown:cds_NZ_WFIY01000004.1_cds_WP_155862778.1_593 target sequence
ESLSSFILVGATIILGVIIFSLFASYGAIYATNALEVQDAQYYSSGLRISAGSPAGNQVPIIINDFNYPNGCIYLVAFFIKPCYS

SEQ ID NO: 41521 - protein, 84 aa, unidentified
  REGION 1..84: note = Description of Unknown:cds_NZ_WFIY01000004.1_cds_WP_155862778.1_593 target sequence
CYSKSASTVTPSCFALINSTSPTEMTLTILGLNSNIIYEGNADVYKAHVGNLELVCTKPGYYTELWIIMKIDCKFFRIGYYVIN

SEQ ID NO: 41522 - protein, 85 aa, unidentified
  REGION 1..85: note = Description of Unknown:cds_NZ_WFIY01000004.1_cds_WP_155862778.1_593 target sequence
AIYATNALEVQDAQYYSSGLRISAGSPAGNQVPIIINDFNYPNGCIYLVAFFIKPCYSKSASTVTPSCFALINSTSPTEMTLTIL

SEQ ID NO: 41523 - protein, 85 aa, unidentified
  REGION 1..85: note = Description of Unknown:cds_NZ_WFIY01000004.1_cds_WP_155862961.1_824 target sequence
LKIFVIELYEDDPEKSTGRKMVRFGFAKYTEKPRGIVLNPLSEEVISIDDIEIVNKYGISVIDSSWNKSDAKFYARFMSRFSRRL

SEQ ID NO: 41524 - protein, 84 aa, unidentified
  REGION 1..84: note = Description of Unknown:cds_NZ_WFIY01000004.1_cds_WP_155862961.1_824 target sequence
RLPLLFAGNPINYAKPYKLSSLEAISASLYILNFVDISLKLLSLYKWGKTFYDLNRELLESYRGKHKDEIIEIEKSFFKEEPQQ

SEQ ID NO: 41525 - protein, 85 aa, unidentified
  REGION 1..85: note = Description of Unknown:cds_NZ_WFIY01000004.1_cds_WP_155862961.1_824 target sequence
KYTEKPRGIVLNPLSEEVISIDDIEIVNKYGISVIDSSWNKSDAKFYARFMSRFSRRLPLLFAGNPINYAKPYKLSSLEAISASL

SEQ ID NO: 41526 - protein, 85 aa, unidentified
  REGION 1..85: note = Description of Unknown:cds_NZ_WFIY01000004.1_cds_WP_155862979.1_849 target sequence
TFAYLGNGVYTIDNEMYIINTYENNFFIIDSKENIGNSELMDILEITKGKKPMYLFLTSCCKSVSGGAWYIYQTLGTRIIAHYPD

SEQ ID NO: 41527 - protein, 84 aa, unidentified
  REGION 1..84: note = Description of Unknown:cds_NZ_WFIY01000004.1_cds_WP_155862979.1_849 target sequence
YPDSVNIRHGECNNLTYTPVNVSVELKGYINYVDNIKIINSKVPTSGSVIIKWKGFLFVGNNKTLSPYGNEVKYICGVNGCIKA

SEQ ID NO: 41528 - protein, 85 aa, unidentified
  REGION 1..85: note = Description of Unknown:cds_NZ_WFIY01000004.1_cds_WP_155862979.1_849 target sequence
IIDSKENIGNSELMDILEITKGKKPMYLFLTSCCKSVSGGAWYIYQTLGTRIIAHYPDSVNIRHGECNNLTYTPVNVSVELKGYI

SEQ ID NO: 41529 - protein, 85 aa, unidentified
  REGION 1..85: note = Description of Unknown:cds_NZ_WFIY01000004.1_cds_WP_155863156.1_1085 target sequence
LNNNMEPKLIITTLPGKDKKCKAEILDRLLIKDENVQIDEIKQNVFLIYSKLSPLEAYGLIISAPPSCIGRIFTIDKISDLSNIF

SEQ ID NO: 41530 - protein, 84 aa, unidentified
  REGION 1..84: note = Description of Unknown:cds_NZ_WFIY01000004.1_cds_WP_155863156.1_1085 target sequence
NIFEDAEKLLSSRKFKKFYVECINRGNKQVDCRSIEIGIGLRMKGKLEVDYKNPDYILFVNLIGDKVYLSIMRKGQEKVSVNTL

SEQ ID NO: 41531 - protein, 85 aa, unidentified
  REGION 1..85: note = Description of Unknown:cds_NZ_WFIY01000004.1_cds_WP_155863156.1_1085 target sequence
RLLIKDENVQIDEIKQNVFLIYSKLSPLEAYGLIISAPPSCIGRIFTIDKISDLSNIFEDAEKLLSSRKFKKFYVECINRGNKQV

SEQ ID NO: 41532 - protein, 85 aa, unidentified
  REGION 1..85: note = Description of Unknown:cds_NZ_WFIY01000004.1_cds_WP_155864439.1_1576 target sequence
NESPAGDIGCGSGQNCKLLKGFVICLDIAEKQLKEAKKRGCENLIQADMEFLPFRDSSFKLLMYIASIHQLPSPNNALAEAMRVL

SEQ ID NO: 41533 - protein, 84 aa, unidentified
  REGION 1..84: note = Description of Unknown:cds_NZ_WFIY01000004.1_cds_WP_155864439.1_1576 target sequence
RVLKKGGKIIITVWLRQIRFLFRKEVIVKSNINGVVVMRYYRLYWPWELKKICEKRGFVTLDYKVYRNRAILPNNAIYIGYKNT

SEQ ID NO: 41534 - protein, 85 aa, unidentified
  REGION 1..85: note = Description of Unknown:cds_NZ_WFIY01000004.1_cds_WP_155864439.1_1576 target sequence
IAEKQLKEAKKRGCENLIQADMEFLPFRDSSFKLLMYIASIHQLPSPNNALAEAMRVLKKGGKIIITVWLRQIRFLFRKEVIVKS

SEQ ID NO: 41535 - protein, 85 aa, unidentified
  REGION 1..85: note = Description of Unknown:cds_NZ_WFIY01000004.1_cds_WP_155863968.1_1892 target sequence
KLYRVYSETGDTYLMAVESKGNVDKIKTEANEFEIEYLGKGTRENEYLFKVNGEIHHVFVDNGYVFVDNASVFKLERAIELPTKE

SEQ ID NO: 41536 - protein, 84 aa, unidentified
  REGION 1..84: note = Description of Unknown:cds_NZ_WFIY01000004.1_cds_WP_155863968.1_1892 target sequence
TKEGESVEEMIKGREGEVISPLQGRVVSIRVKEGDAVNKGQPLLSIEAMKSETIISAPVAGVVEKILVKQGQGVKKGDTLVIIK

SEQ ID NO: 41537 - protein, 85 aa, unidentified
  REGION 1..85: note = Description of Unknown:cds_NZ_WFIY01000004.1_cds_WP_155863968.1_1892 target sequence
TEANEFEIEYLGKGTRENEYLFKVNGEIHHVFVDNGYVFVDNASVFKLERAIELPTKEGESVEEMIKGREGEVISPLQGRVVSIR

SEQ ID NO: 41538 - protein, 85 aa, unidentified
  REGION 1..85: note = Description of Unknown:cds_NZ_WFIY01000004.1_cds_WP_155864192.1_2153 target sequence
SEWERDVKKYGKLRLDESVDEALISLELLKQCKLRNSANKAFLAFKAFLSGLISINHSTFSSLLDEKERKFFYKIGFTAPSNRLI

SEQ ID NO: 41539 - protein, 84 aa, unidentified
  REGION 1..84: note = Description of Unknown:cds_NZ_WFIY01000004.1_cds_WP_155864192.1_2153 target sequence
RLISYSSLLEKDFPGITNLAKGAMSLHVFSYLGYDKAGEYSPITSKEDAQKWIIDFILNLANLIIKINDKGKEILKEIEEIHKQ

SEQ ID NO: 41540 - protein, 85 aa, unidentified
  REGION 1..85: note = Description of Unknown:cds_NZ_WFIY01000004.1_cds_WP_155864192.1_2153 target sequence
LLKQCKLRNSANKAFLAFKAFLSGLISINHSTFSSLLDEKERKFFYKIGFTAPSNRLISYSSLLEKDFPGITNLAKGAMSLHVFS

SEQ ID NO: 41541 - protein, 85 aa, unidentified
  REGION 1..85: note = Description of Unknown:cds_NZ_WFIY01000004.1_cds_WP_155864275.1_2268 target sequence
CDLKFGKVERPILDDKFVLLRKELFEKLADEKFLYVLSTHDKGNLSKSYFYLIVDKLREAGLLMENAISFSAVLPFKASNEGIWF

SEQ ID NO: 41542 - protein, 84 aa, unidentified
  REGION 1..84: note = Description of Unknown:cds_NZ_WFIY01000004.1_cds_WP_155864275.1_2268 target sequence
IWFTDGLLYRKGKELFYINMESDKLTCSSCPIYSQCIYAIKTIAKDRDIPLIKENPMEEWKLIIDSLKKEFGEKVASLKILSFK

SEQ ID NO: 41543 - protein, 85 aa, unidentified
  REGION 1..85: note = Description of Unknown:cds_NZ_WFIY01000004.1_cds_WP_155864275.1_2268 target sequence
LADEKFLYVLSTHDKGNLSKSYFYLIVDKLREAGLLMENAISFSAVLPFKASNEGIWFTDGLLYRKGKELFYINMESDKLTCSSC

SEQ ID NO: 41544 - protein, 85 aa, unidentified
  REGION 1..85: note = Description of Unknown:cds_NC_003214.2_cds_NP_445700.1_35 target sequence
VARRNRRLSSASVYRYYLKRISMNIGTTGHVNGLSIAGNPEIMRAIARLSEQETYNWVTDYAPSHLAKEVVKQISGKYNIPGAYQ

SEQ ID NO: 41545 - protein, 84 aa, unidentified
  REGION 1..84: note = Description of Unknown:cds_NC_003214.2_cds_NP_445700.1_35 target sequence
YQGLLMAFAEKVLANYILDYKGEPLVEIHHNFLWELMQRQSGAGLGVTSGFIYTFVRKDGKPVTVDMSKVLTEIEDALFKLVKK

SEQ ID NO: 41546 - protein, 85 aa, unidentified
  REGION 1..85: note = Description of Unknown:cds_NC_003214.2_cds_NP_445700.1_35 target sequence
TGHVNGLSIAGNPEIMRAIARLSEQETYNWVTDYAPSHLAKEVVKQISGKYNIPGAYQGLLMAFAEKVLANYILDYKGEPLVEIH

SEQ ID NO: 41547 - protein, 85 aa, unidentified
  REGION 1..85: note = Description of Unknown:cds_NC_029316.1_cds_YP_009230299.1_46 target sequence
LSWFALLYSCWVCTGSIVISLNISSAVFSSFSSSFSFAMDNRLIYYIINIVFMTPPYSTTTIVFILILAGLIIVPLAMFFSFSIS

SEQ ID NO: 41548 - protein, 84 aa, unidentified
  REGION 1..84: note = Description of Unknown:cds_NC_029316.1_cds_YP_009230299.1_46 target sequence
ISASTNSLNNVTTLIAKDDNQSINVLSEGNISIYYINGSYNQPQYLAGSFFVYIACIFRNPITLGVLIGISIVLSALFLNKKNP

SEQ ID NO: 41549 - protein, 85 aa, unidentified
  REGION 1..85: note = Description of Unknown:cds_NC_029316.1_cds_YP_009230299.1_46 target sequence
FSSFSSSFSFAMDNRLIYYIINIVFMTPPYSTTTIVFILILAGLIIVPLAMFFSFSISASTNSLNNVTTLIAKDDNQSINVLSEG

SEQ ID NO: 41550 - protein, 85 aa, unidentified
  REGION 1..85: note = Description of Unknown:cds_NC_007409.1_cds_YP_319854.1_23 target sequence
NFEGFFTKEEMEKIKEEHDRDWRVGATYFKFNDDRITIFVFGYVPGDEFEYNMDLVISQIENVQFPVFCFTFYEKFSGEVMHLPV

SEQ ID NO: 41551 - protein, 84 aa, unidentified
  REGION 1..84: note = Description of Unknown:cds_NC_007409.1_cds_YP_319854.1_23 target sequence
LPVTKFCLNSLANNNEITFVFCDRIEEVKEKEAICTKERVLHMKNLVKEKAKQMLASFKEFDQNFVFREYIRTIKNPPPSCNPD

SEQ ID NO: 41552 - protein, 85 aa, unidentified
  REGION 1..85: note = Description of Unknown:cds_NC_007409.1_cds_YP_319854.1_23 target sequence
YFKFNDDRITIFVFGYVPGDEFEYNMDLVISQIENVQFPVFCFTFYEKFSGEVMHLPVTKFCLNSLANNNEITFVFCDRIEEVKE

SEQ ID NO: 41553 - protein, 85 aa, unidentified
  REGION 1..85: note = Description of Unknown:cds_NC_002728.1_cds_NP_112024.1_5 target sequence
MASILLTLFRRTKKKYRRHTDDQVFNNPASKIKQKPGKIFCSAPVENLNKLRGECLRMMEMLKEETWRIYPVLLPQMELLERECR

SEQ ID NO: 41554 - protein, 84 aa, unidentified
  REGION 1..84: note = Description of Unknown:cds_NC_002728.1_cds_NP_112024.1_5 target sequence
RECRTPVTGQKVQMTYNWTQWLQTLYTMIMEENVPDMDLLQALREGGVITHQEQTMGMYVLYLMQRCCPMLPKLQFLKKIGKLI

SEQ ID NO: 41555 - protein, 85 aa, unidentified
  REGION 1..85: note = Description of Unknown:cds_NC_002728.1_cds_NP_112024.1_5 target sequence
PASKIKQKPGKIFCSAPVENLNKLRGECLRMMEMLKEETWRIYPVLLPQMELLERECRTPVTGQKVQMTYNWTQWLQTLYTMIME

SEQ ID NO: 41556 - protein, 85 aa, unidentified
  REGION 1..85: note = Description of Unknown:cds_NZ_WFIY01000004.1_cds_WP_155863351.1_1322 target sequence
RFFITGKPGVGKTTILIYVVKELIKRNYTVVGFYCPEVREGGRRIGFKIVSIPTGKERWLAKVGEGKIKVGKYAVQDEAEEVVKD

SEQ ID NO: 41557 - protein, 84 aa, unidentified
  REGION 1..84: note = Description of Unknown:cds_NZ_WFIY01000004.1_cds_WP_155863351.1_1322 target sequence
VVKDVKDSLPKAQVIAIDEIGPMELSMPLIKSLIDEVLKLDKPLIAVVHRNVKLNVDGKTYIVTEENRDSLKEKILNEIVRTLG

SEQ ID NO: 41558 - protein, 85 aa, unidentified
  REGION 1..85: note = Description of Unknown:cds_NZ_WFIY01000004.1_cds_WP_155863351.1_1322 target sequence
YTVVGFYCPEVREGGRRIGFKIVSIPTGKERWLAKVGEGKIKVGKYAVQDEAEEVVKDVKDSLPKAQVIAIDEIGPMELSMPLIK

SEQ ID NO: 41559 - protein, 85 aa, unidentified
  REGION 1..85: note = Description of Unknown:cds_NZ_WFIY01000004.1_cds_WP_155863420.1_1402 target sequence
DYCSALKEVLKHNIVWIEAQSCSGETVMILRSGCEGLEELFFHSSPVKFISLVCEEKSGREILEKILEMTDYILVVEGAIPSNDS

SEQ ID NO: 41560 - protein, 84 aa, unidentified
  REGION 1..84: note = Description of Unknown:cds_NZ_WFIY01000004.1_cds_WP_155863420.1_1402 target sequence
SNDSLCTFGGYSCTQVIKLLAERANSIIAVGSCAVNGGILREAGSKGVREIINSKKVLEVPGCPASPQMIVAMIYSALGENHGS

SEQ ID NO: 41561 - protein, 85 aa, unidentified
  REGION 1..85: note = Description of Unknown:cds_NZ_WFIY01000004.1_cds_WP_155863420.1_1402 target sequence
MILRSGCEGLEELFFHSSPVKFISLVCEEKSGREILEKILEMTDYILVVEGAIPSNDSLCTFGGYSCTQVIKLLAERANSIIAVG

SEQ ID NO: 41562 - protein, 85 aa, unidentified
  REGION 1..85: note = Description of Unknown:cds_NZ_WFIY01000004.1_cds_WP_155863482.1_1436 target sequence
KVVIGVGNIFMKDDGCGSFIAQALDGLIPIDVKDLGMGSLSIIDDIRDYDEIIIIDAADIDNDVEVFEIKTELEDEIPQAVISMS

SEQ ID NO: 41563 - protein, 84 aa, unidentified
  REGION 1..84: note = Description of Unknown:cds_NZ_WFIY01000004.1_cds_WP_155863482.1_1436 target sequence
ISMSLGGSHSMSMRDILTILNSDGKNRKIIVIGCKPKEIDVGYGLSEEMIKNGLKAIDKLKEFIDFDVDEAKKRFLSIIREIKR

SEQ ID NO: 41564 - protein, 85 aa, unidentified
  REGION 1..85: note = Description of Unknown:cds_NZ_WFIY01000004.1_cds_WP_155863482.1_1436 target sequence
IPIDVKDLGMGSLSIIDDIRDYDEIIIIDAADIDNDVEVFEIKTELEDEIPQAVISMSLGGSHSMSMRDILTILNSDGKNRKIIV

SEQ ID NO: 41565 - protein, 85 aa, unidentified
  REGION 1..85: note = Description of Unknown:cds_NZ_WFIY01000004.1_cds_WP_155864464.1_1866 target sequence
REPSTLLVSIILILLPVIPGFLFNFYAFVGASIVGLAIVTYYFTSNLPWKGVKQAIVAVYFTGVFSLGLALGVFFALPIKPREFA

SEQ ID NO: 41566 - protein, 84 aa, unidentified
  REGION 1..84: note = Description of Unknown:cds_NZ_WFIY01000004.1_cds_WP_155864464.1_1866 target sequence
REFALVALVESIPFFISFAYLMKFILAKAISKDLLKVGNGYFAMLLVIIIGGLIGRFLHNFYELIILYSGFIALGIIAYLYFKE

SEQ ID NO: 41567 - protein, 85 aa, unidentified
  REGION 1..85: note = Description of Unknown:cds_NZ_WFIY01000004.1_cds_WP_155864464.1_1866 target sequence
FVGASIVGLAIVTYYFTSNLPWKGVKQAIVAVYFTGVFSLGLALGVFFALPIKPREFALVALVESIPFFISFAYLMKFILAKAIS

SEQ ID NO: 41568 - protein, 85 aa, unidentified
  REGION 1..85: note = Description of Unknown:cds_NC_035460.1_cds_YP_009407967.1_16 target sequence
EELSIITFKNVLKYYLDEKILESQYESLNNIELYTLSYMRPFCDKIIKNHIKEFNNMYESLKLSKDINNINALTKLLKSNKQIPA

SEQ ID NO: 41569 - protein, 84 aa, unidentified
  REGION 1..84: note = Description of Unknown:cds_NC_035460.1_cds_YP_009407967.1_16 target sequence
QIPAKIAAIAFTAVLVNKLTKYHSITDAQSLSYCVSCDMSLDSEKILNFINCKNSSKFKKSIFKTISILCIGTGIIYYYLTITK

SEQ ID NO: 41570 - protein, 85 aa, unidentified
  REGION 1..85: note = Description of Unknown:cds_NC_035460.1_cds_YP_009407967.1_16 target sequence
LNNIELYTLSYMRPFCDKIIKNHIKEFNNMYESLKLSKDINNINALTKLLKSNKQIPAKIAAIAFTAVLVNKLTKYHSITDAQSL

SEQ ID NO: 41571 - protein, 85 aa, unidentified
  REGION 1..85: note = Description of Unknown:cds_NC_035460.1_cds_YP_009408079.1_128 target sequence
SILNTIRFLEKTAFYKSYTSLPTEKVQIEHKNNKFVFYKPKIVKVQKYLTLAKIYHNDLVVLGKITISNIKMLFIYMDLCYYGID

SEQ ID NO: 41572 - protein, 84 aa, unidentified
  REGION 1..84: note = Description of Unknown:cds_NC_035460.1_cds_YP_009408079.1_128 target sequence
YGIDKCGHLYKLGSTIDKLRITQSKNYSNYQNSNTYSYECTNNYYDDNIDNYDDYNDDNDDDNNDNNDDNDDDDNNDNYNTYDN

SEQ ID NO: 41573 - protein, 85 aa, unidentified
  REGION 1..85: note = Description of Unknown:cds_NC_035460.1_cds_YP_009408079.1_128 target sequence
IEHKNNKFVFYKPKIVKVQKYLTLAKIYHNDLVVLGKITISNIKMLFIYMDLCYYGIDKCGHLYKLGSTIDKLRITQSKNYSNYQ

SEQ ID NO: 41574 - protein, 85 aa, unidentified
  REGION 1..85: note = Description of Unknown:cds_NC_035460.1_cds_YP_009408082.1_131 target sequence
VAFNRQTLEKIKKMSTPAAIFMIISTIVSGIGTMLQYKNELFPNACDKGWMSYDNFCYYDTRMQLSAISALTVCATYSAKLPRIN

SEQ ID NO: 41575 - protein, 84 aa, unidentified
  REGION 1..84: note = Description of Unknown:cds_NC_035460.1_cds_YP_009408082.1_131 target sequence
PRINSRHLKVMSLTFNDDFWIGIKNKENNLVDVNSNKTINKESNELVKQIKVDNNKLCYIYKNNKLEPTKCEEVKKTLCVKRFY

SEQ ID NO: 41576 - protein, 85 aa, unidentified
  REGION 1..85: note = Description of Unknown:cds_NC_035460.1_cds_YP_009408082.1_131 target sequence
VSGIGTMLQYKNELFPNACDKGWMSYDNFCYYDTRMQLSAISALTVCATYSAKLPRINSRHLKVMSLTFNDDFWIGIKNKENNLV

SEQ ID NO: 41577 - protein, 85 aa, unidentified
  REGION 1..85: note = Description of Unknown:cds_NC_005830.1_cds_YP_003736.1_11 target sequence
ANFFRTAKALIIIPDDIPGRLVIFKLHGRLVYRYQTIRRIITKTGREAYVYRFARLPCTKKPNEPDFQICIISELEYCEPEIGGR

SEQ ID NO: 41578 - protein, 84 aa, unidentified
  REGION 1..84: note = Description of Unknown:cds_NC_005830.1_cds_YP_003736.1_11 target sequence
IGGRRNKHPLSFRYTSCQPFYLKDYDSLDSLYKAMDSTLDSLIIEYSDFISGFGESVEDLAHESTQINVCNLLTDEEEISHDYC

SEQ ID NO: 41579 - protein, 85 aa, unidentified
  REGION 1..85: note = Description of Unknown:cds_NC_005830.1_cds_YP_003736.1_11 target sequence
GRLVYRYQTIRRIITKTGREAYVYRFARLPCTKKPNEPDFQICIISELEYCEPEIGGRRNKHPLSFRYTSCQPFYLKDYDSLDSL

SEQ ID NO: 41580 - protein, 85 aa, unidentified
  REGION 1..85: note = Description of Unknown:cds_NC_001906.3_cds_NP_047109.1_4 target sequence
MASILLTLFRRTKKKYKRHTDDQASNNQVPKTGQEHGRTSCRAPVENMNRLRGECLRMMEVLKEEMWRIYPVLLPQMELLDKECQ

SEQ ID NO: 41581 - protein, 84 aa, unidentified
  REGION 1..84: note = Description of Unknown:cds_NC_001906.3_cds_NP_047109.1_4 target sequence
KECQTPELGQKTQMTYNWTQWLQTLYTMIMEENVPDMDLLQALREGGVITCQEHTMGMYVLYLIQRCCPMLPKLQFLKKLGKLI

SEQ ID NO: 41582 - protein, 85 aa, unidentified
  REGION 1..85: note = Description of Unknown:cds_NC_001906.3_cds_NP_047109.1_4 target sequence
QVPKTGQEHGRTSCRAPVENMNRLRGECLRMMEVLKEEMWRIYPVLLPQMELLDKECQTPELGQKTQMTYNWTQWLQTLYTMIME

SEQ ID NO: 41583 - protein, 85 aa, unidentified
  REGION 1..85: note = Description of Unknown:cds_NZ_WFIY01000004.1_cds_WP_155862622.1_401 target sequence
SQTTVQKPIDKILAELKAKGIIAKAESESRGSLDVTKDKIIEVAKIMKEIGFDHVIAVTGIDFPEQQKIQIVYHVSSYSVEDLQK

SEQ ID NO: 41584 - protein, 84 aa, unidentified
  REGION 1..84: note = Description of Unknown:cds_NZ_WFIY01000004.1_cds_WP_155862622.1_401 target sequence
EDLQKIIFAIKTYVDYKDPSLPSLTQIWGSAWTGERETYEMLGVRFEGHPQLSRLFLPEDFEGVYPLRKDFKIKLEGLFVDKPG

SEQ ID NO: 41585 - protein, 85 aa, unidentified
  REGION 1..85: note = Description of Unknown:cds_NZ_WFIY01000004.1_cds_WP_155862622.1_401 target sequence
ESRGSLDVTKDKIIEVAKIMKEIGFDHVIAVTGIDFPEQQKIQIVYHVSSYSVEDLQKIIFAIKTYVDYKDPSLPSLTQIWGSAW

SEQ ID NO: 41586 - protein, 85 aa, unidentified
  REGION 1..85: note = Description of Unknown:cds_NZ_WFIY01000004.1_cds_WP_155863223.1_1169 target sequence
ELDDVDLKILKIIQNDAKYPLEKIAEEVKVPKSTVAYRIKKMEKMGVIKGYFTYVDPASLNLDYLVITLVRARYGKDYHDSLGKK

SEQ ID NO: 41587 - protein, 84 aa, unidentified
  REGION 1..84: note = Description of Unknown:cds_NZ_WFIY01000004.1_cds_WP_155863223.1_1169 target sequence
SLGKKLSQLPGVWGVYFVLGDMDFVVLARFKNREDFMKNFLEKLINMPEIERTSTHVVAKVYRETPYVIIDEGKANNEEIKNGK

SEQ ID NO: 41588 - protein, 85 aa, unidentified
  REGION 1..85: note = Description of Unknown:cds_NZ_WFIY01000004.1_cds_WP_155863223.1_1169 target sequence
VKVPKSTVAYRIKKMEKMGVIKGYFTYVDPASLNLDYLVITLVRARYGKDYHDSLGKKLSQLPGVWGVYFVLGDMDFVVLARFKN

SEQ ID NO: 41589 - protein, 85 aa, unidentified
  REGION 1..85: note = Description of Unknown:cds_NZ_WFIY01000004.1_cds_WP_155863629.1_1524 target sequence
HILSKIGLIVLVIGIILAGVGFYEFSSLINEMEPVIELHGAQRIILGPYQNYTIPVSPSPGKIIAFAYNSTSPIYVTLPSSFTNS

SEQ ID NO: 41590 - protein, 84 aa, unidentified
  REGION 1..84: note = Description of Unknown:cds_NZ_WFIY01000004.1_cds_WP_155863629.1_1524 target sequence
SFTNSTPISTAERVYLSPTGDVSGVIEFQNPSNSSIIVYYVLKYIEVSSIDVYSLVFVLLGALLFIVGIIIAIIGLILGRRKRT

SEQ ID NO: 41591 - protein, 85 aa, unidentified
  REGION 1..85: note = Description of Unknown:cds_NZ_WFIY01000004.1_cds_WP_155863629.1_1524 target sequence
LINEMEPVIELHGAQRIILGPYQNYTIPVSPSPGKIIAFAYNSTSPIYVTLPSSFTNSTPISTAERVYLSPTGDVSGVIEFQNPS

SEQ ID NO: 41592 - protein, 85 aa, unidentified
  REGION 1..85: note = Description of Unknown:cds_NZ_WFIY01000004.1_cds_WP_155864470.1_1960 target sequence
AITIAMLFRRKGIFITEILIAVFSYFVLSYFGKSYLYVFTVRAITYINLYFAISELVDKSTVLDALGEKGVPIIIALAYYPYFFQ

SEQ ID NO: 41593 - protein, 84 aa, unidentified
  REGION 1..84: note = Description of Unknown:cds_NZ_WFIY01000004.1_cds_WP_155864470.1_1960 target sequence
PYFFQLSSEVSFYAKARGIGFNPIKISRPLLVEMIRVAENLYVAYTVKLFGNYSGKRNLKPRTSDLILLTIGVAIFTLSVMFPL

SEQ ID NO: 41594 - protein, 85 aa, unidentified
  REGION 1..85: note = Description of Unknown:cds_NZ_WFIY01000004.1_cds_WP_155864470.1_1960 target sequence
LSYFGKSYLYVFTVRAITYINLYFAISELVDKSTVLDALGEKGVPIIIALAYYPYFFQLSSEVSFYAKARGIGFNPIKISRPLLV

SEQ ID NO: 41595 - protein, 85 aa, unidentified
  REGION 1..85: note = Description of Unknown:cds_NZ_WFIY01000004.1_cds_WP_155864229.1_2198 target sequence
VTPLKENELKEHVIISYKPNAKYAYTAGQAQSKYLMGFKEGKIYGRKCNKCGKIYVPPRMYCDECFRPTDEWIEVKDEGIVMTAV

SEQ ID NO: 41596 - protein, 84 aa, unidentified
  REGION 1..84: note = Description of Unknown:cds_NZ_WFIY01000004.1_cds_WP_155864229.1_2198 target sequence
VMTAVASFISWTRERLKEPEIVGVIRLLPSNDRDFVYPGIFHRICTTYEEVKNMNIIGKKVKAIWRSKEERKGSIEDIQCFKVI

SEQ ID NO: 41597 - protein, 85 aa, unidentified
  REGION 1..85: note = Description of Unknown:cds_NZ_WFIY01000004.1_cds_WP_155864229.1_2198 target sequence
GQAQSKYLMGFKEGKIYGRKCNKCGKIYVPPRMYCDECFRPTDEWIEVKDEGIVMTAVASFISWTRERLKEPEIVGVIRLLPSND

SEQ ID NO: 41598 - protein, 85 aa, unidentified
  REGION 1..85: note = Description of Unknown:cds_NC_035460.1_cds_YP_009408102.1_151 target sequence
DLTLEKLDNVIISMSNFLNTFLKIDLTKVDNISLSMDMYHILYEYFIQQLNMKHKKYGKLFSKLFSTKRYAYKHINKNNLNQIIS

SEQ ID NO: 41599 - protein, 84 aa, unidentified
  REGION 1..84: note = Description of Unknown:cds_NC_035460.1_cds_YP_009408102.1_151 target sequence
NQIISAYLNNNYDYITSFILESLDVTDILHYSKLLIGICTILADVDVKYKCISQSSIIFDLLNVMITLDVSLILKQWIYTSINK

SEQ ID NO: 41600 - protein, 85 aa, unidentified
  REGION 1..85: note = Description of Unknown:cds_NC_035460.1_cds_YP_009408102.1_151 target sequence
KVDNISLSMDMYHILYEYFIQQLNMKHKKYGKLFSKLFSTKRYAYKHINKNNLNQIISAYLNNNYDYITSFILESLDVTDILHYS

SEQ ID NO: 41601 - protein, 85 aa, unidentified
  REGION 1..85: note = Description of Unknown:cds_NC_030656.1_cds_YP_009268856.1_141 target sequence
DTKLFAVSVLVLWSFAFSEDYTIDSVKQSTCFSIGASDVTLRCLAKVKEHTSFDQMYWTACPTGNPKQCFFPEDECCSKVTKRIK

SEQ ID NO: 41602 - protein, 84 aa, unidentified
  REGION 1..84: note = Description of Unknown:cds_NC_030656.1_cds_YP_009268856.1_141 target sequence
TKRIKNKKRTTTSYHHVLFSELTISNLAKSSEVYRCVYESNGGTWSRLINVTAVLSGMSPIMECESTREKVDEFWTHSTPYHVL

SEQ ID NO: 41603 - protein, 85 aa, unidentified
  REGION 1..85: note = Description of Unknown:cds_NC_030656.1_cds_YP_009268856.1_141 target sequence
QSTCFSIGASDVTLRCLAKVKEHTSFDQMYWTACPTGNPKQCFFPEDECCSKVTKRIKNKKRTTTSYHHVLFSELTISNLAKSSE

SEQ ID NO: 41604 - protein, 85 aa, unidentified
  REGION 1..85: note = Description of Unknown:cds_NC_010495.1_cds_YP_001742074.1_37 target sequence
TSLNSPDCVMSDEEFAQLMFGKPYKDRCCHVDAVDCWGLVVLYYRLCRDINIHHDDNYDAGGSFVTCFNSEVTFWRDTQSPATGD

SEQ ID NO: 41605 - protein, 84 aa, unidentified
  REGION 1..84: note = Description of Unknown:cds_NC_010495.1_cds_YP_001742074.1_37 target sequence
PATGDVVVAYRGNVPVHIAMMWGRDKILHAREKTAVRFDRLRTLEKISTKLRFLTYASNSYPEDSGHTERNGSCASGYKPVEVA

SEQ ID NO: 41606 - protein, 85 aa, unidentified
  REGION 1..85: note = Description of Unknown:cds_NC_010495.1_cds_YP_001742074.1_37 target sequence
CCHVDAVDCWGLVVLYYRLCRDINIHHDDNYDAGGSFVTCFNSEVTFWRDTQSPATGDVVVAYRGNVPVHIAMMWGRDKILHARE

SEQ ID NO: 41607 - protein, 85 aa, unidentified
  REGION 1..85: note = Description of Unknown:vpeps_2VXZ_1 target sequence
PIGHSREVLVRLRDILALLADGCKTTSLIQQRLGLSHGRAKALIYVLEKEGRVTRVAFGNVALVCLSMDQYRQLVDGMIREVERL

SEQ ID NO: 41608 - protein, 85 aa, unidentified
  REGION 1..85: note = Description of Unknown:vpeps_2VXZ_1 target sequence
REVERLVTTNKLKFISPPRLHDLIIKDPQARKFFSSIIPIAHRTAIILSFLNHLLKMIYGEPYVKTDETVYLTANRKVHIEPPAK

SEQ ID NO: 41609 - protein, 85 aa, unidentified
  REGION 1..85: note = Description of Unknown:vpeps_2VXZ_1 target sequence
LIQQRLGLSHGRAKALIYVLEKEGRVTRVAFGNVALVCLSMDQYRQLVDGMIREVERLVTTNKLKFISPPRLHDLIIKDPQARKF

SEQ ID NO: 41610 - protein, 85 aa, unidentified
  REGION 1..85: note = Description of Unknown:cds_NZ_WFIY01000004.1_cds_WP_155862624.1_404 target sequence
AVKEYKKENPFRLFADHLQSIGTGIKYMVKPQRITLKYPEESLTLPAGYRGIIRLYKDICIGCTLCAMICPADAMKMMTYQGKKL

SEQ ID NO: 41611 - protein, 84 aa, unidentified
  REGION 1..84: note = Description of Unknown:cds_NZ_WFIY01000004.1_cds_WP_155862624.1_404 target sequence
YQGKKLPTINYGRCVFCGFCVDICPVDALKETGVHDVAFSNRRDLIFDPEKFNKNFDNPPEDKVVKKVRAVIDEEKGIKYVPES

SEQ ID NO: 41612 - protein, 85 aa, unidentified
  REGION 1..85: note = Description of Unknown:cds_NZ_WFIY01000004.1_cds_WP_155862624.1_404 target sequence
MVKPQRITLKYPEESLTLPAGYRGIIRLYKDICIGCTLCAMICPADAMKMMTYQGKKLPTINYGRCVFCGFCVDICPVDALKETG

SEQ ID NO: 41613 - protein, 85 aa, unidentified
  REGION 1..85: note = Description of Unknown:cds_NZ_WFIY01000004.1_cds_WP_155862625.1_405 target sequence
FQSLNLCLILFLFFSIISISSAIFIVSSKNLFYAAISLAFLGVSIAVLIALISFQYSLYSVFHLLLYVGATVVFLSISLVMFKGL

SEQ ID NO: 41614 - protein, 84 aa, unidentified
  REGION 1..84: note = Description of Unknown:cds_NZ_WFIY01000004.1_cds_WP_155862625.1_405 target sequence
VMFKGLEVRQINTAWAQVVAGVSAVLIFIAVVLSLSGVQVSQVGEINLQTLSSIILEKYWFPAVVLVVGLLTTLIEAITLARRD

SEQ ID NO: 41615 - protein, 85 aa, unidentified
  REGION 1..85: note = Description of Unknown:cds_NZ_WFIY01000004.1_cds_WP_155862625.1_405 target sequence
SKNLFYAAISLAFLGVSIAVLIALISFQYSLYSVFHLLLYVGATVVFLSISLVMFKGLEVRQINTAWAQVVAGVSAVLIFIAVVL

SEQ ID NO: 41616 - protein, 85 aa, unidentified
  REGION 1..85: note = Description of Unknown:cds_NZ_WFIY01000004.1_cds_WP_155863060.1_964 target sequence
KKLAMITRFPCQEDAVEYINNNFDGVIGLGDVECPQYLNNFHGILGEMESVYIMKYLKKTEKLITKEFLGLSTDFSTEISITHFP

SEQ ID NO: 41617 - protein, 84 aa, unidentified
  REGION 1..84: note = Description of Unknown:cds_NZ_WFIY01000004.1_cds_WP_155863060.1_964 target sequence
SITHFPPKGFKSGMIINVEIGKKEISAKILSSKTKIIIHGHSENQTIVNSQGFQVISVGAFEKGYLAIYYPEEKKVQLSKISSH

SEQ ID NO: 41618 - protein, 85 aa, unidentified
  REGION 1..85: note = Description of Unknown:cds_NZ_WFIY01000004.1_cds_WP_155863060.1_964 target sequence
GLGDVECPQYLNNFHGILGEMESVYIMKYLKKTEKLITKEFLGLSTDFSTEISITHFPPKGFKSGMIINVEIGKKEISAKILSSK

SEQ ID NO: 41619 - protein, 85 aa, unidentified
  REGION 1..85: note = Description of Unknown:cds_NZ_WFIY01000004.1_cds_WP_155863134.1_1055 target sequence
ACVFQIVGKKDSGKTTTILEVIKELKRKRKDLIIAVVKHSHHVIDDENKDTFKFKKEGADLVIFHSNDCALFFDCKDFDYLSLFP

SEQ ID NO: 41620 - protein, 84 aa, unidentified
  REGION 1..84: note = Description of Unknown:cds_NZ_WFIY01000004.1_cds_WP_155863134.1_1055 target sequence
YLSLFPADIILIEGFKDLNLGDKFEIRSPEEAKEIAENISKKAEGCISYPNIEINGEKAQKSLLTFFLYTIMKKYGIKEIRIAD

SEQ ID NO: 41621 - protein, 85 aa, unidentified
  REGION 1..85: note = Description of Unknown:cds_NZ_WFIY01000004.1_cds_WP_155863134.1_1055 target sequence
KRKDLIIAVVKHSHHVIDDENKDTFKFKKEGADLVIFHSNDCALFFDCKDFDYLSLFPADIILIEGFKDLNLGDKFEIRSPEEAK

SEQ ID NO: 41622 - protein, 85 aa, unidentified
  REGION 1..85: note = Description of Unknown:cds_NZ_WFIY01000004.1_cds_WP_155863151.1_1080 target sequence
LLEELLIALVIYFPAFAANGSAPFVRKGHPIDFNKNFFDGRRIFGDGKTFEGLLVALTFGTIIGVIIAKFWGASWIFISFIESLA

SEQ ID NO: 41623 - protein, 84 aa, unidentified
  REGION 1..84: note = Description of Unknown:cds_NZ_WFIY01000004.1_cds_WP_155863151.1_1080 target sequence
IESLAAMLGDMAGAFIKRRLNIPRGGRALGLDQLDFVLGSSLALVLLHVNIELCQFLFIILIAFIMHILTNNVAYRLKIKSVPW

SEQ ID NO: 41624 - protein, 85 aa, unidentified
  REGION 1..85: note = Description of Unknown:cds_NZ_WFIY01000004.1_cds_WP_155863151.1_1080 target sequence
GHPIDFNKNFFDGRRIFGDGKTFEGLLVALTFGTIIGVIIAKFWGASWIFISFIESLAAMLGDMAGAFIKRRLNIPRGGRALGLD

SEQ ID NO: 41625 - protein, 85 aa, unidentified
  REGION 1..85: note = Description of Unknown:cds_NZ_WFIY01000004.1_cds_WP_155863815.1_1706 target sequence
AAKVSQIATTKVYVVKPNVTIAEAAKEMKEHNLGSLVVIDSQNRVAGIITERDIVRAVSNRDIDSPVEKYMTKEVKGVTEDTEVT

SEQ ID NO: 41626 - protein, 84 aa, unidentified
  REGION 1..84: note = Description of Unknown:cds_NZ_WFIY01000004.1_cds_WP_155863815.1_1706 target sequence
EDTEVTDALDVMLNNGFRHLPIIRRDGKLYGIVSIRDLARALLDVHTMQFGKPAEEVKGTGVVCPVCGMEIDEYGYCGCGAGSG

SEQ ID NO: 41627 - protein, 85 aa, unidentified
  REGION 1..85: note = Description of Unknown:cds_NZ_WFIY01000004.1_cds_WP_155863815.1_1706 target sequence
MKEHNLGSLVVIDSQNRVAGIITERDIVRAVSNRDIDSPVEKYMTKEVKGVTEDTEVTDALDVMLNNGFRHLPIIRRDGKLYGIV

SEQ ID NO: 41628 - protein, 85 aa, unidentified
  REGION 1..85: note = Description of Unknown:cds_NZ_WFIY01000004.1_cds_WP_155864191.1_2152 target sequence
DYEKIFGNYTKRTGFIEVSIAIPLIIIDFLFLHNIINISILSPIIFTLYMILEIITIYLIISKYKVMSTNYVIAMFTVPFGFFNI

SEQ ID NO: 41629 - protein, 84 aa, unidentified
  REGION 1..84: note = Description of Unknown:cds_NZ_WFIY01000004.1_cds_WP_155864191.1_2152 target sequence
FGFFNITLTNVLSAIKPVNVSLLTWLLSNFSFILVYVLSIKIIYMKYKPVRIILKKYDGKYKRAGYIALAIIAALLSLLSTHAI

SEQ ID NO: 41630 - protein, 85 aa, unidentified
  REGION 1..85: note = Description of Unknown:cds_NZ_WFIY01000004.1_cds_WP_155864191.1_2152 target sequence
DFLFLHNIINISILSPIIFTLYMILEIITIYLIISKYKVMSTNYVIAMFTVPFGFFNITLTNVLSAIKPVNVSLLTWLLSNFSFI

SEQ ID NO: 41631 - protein, 85 aa, unidentified
  REGION 1..85: note = Description of Unknown:cds_NZ_WFIY01000004.1_cds_WP_155864239.1_2210 target sequence
DELERKIIDALEKQDMNSLSGLVKSLSMMANFDGIVIYYVTFDNRDGKIVVPKESEDYNRLINAVAPTSMTSSIEKMLRAMMGIE

SEQ ID NO: 41632 - protein, 84 aa, unidentified
  REGION 1..84: note = Description of Unknown:cds_NZ_WFIY01000004.1_cds_WP_155864239.1_2210 target sequence
AMMGIEEEPEKETQYEVPEEEDFEIIPKGDELFVVGRVEEEPEVRIESGVLDVGKKAITLPPGNWKIVEKKFKNGILTVHLQKG

SEQ ID NO: 41633 - protein, 85 aa, unidentified
  REGION 1..85: note = Description of Unknown:cds_NZ_WFIY01000004.1_cds_WP_155864239.1_2210 target sequence
MMANFDGIVIYYVTFDNRDGKIVVPKESEDYNRLINAVAPTSMTSSIEKMLRAMMGIEEEPEKETQYEVPEEEDFEIIPKGDELF

SEQ ID NO: 41634 - protein, 85 aa, unidentified
  REGION 1..85: note = Description of Unknown:cds_NZ_WFIY01000004.1_cds_WP_155862678.1_474 target sequence
KKKRDIADVLTDIRIARSRLRIMKTKIEGRLTQQASLSHSTILTKEYIKEAEQLKKISEFLDTLDIILELIEIKVETIIYIGYIV

SEQ ID NO: 41635 - protein, 84 aa, unidentified
  REGION 1..84: note = Description of Unknown:cds_NZ_WFIY01000004.1_cds_WP_155862678.1_474 target sequence
IYIGYIVNDAPAVLEALRELKKNGEFLSPELSALVDDIYNGFYSAINVPSEIKVSASKEAKKVLDEAKTIAKYRENGKNIDINT

SEQ ID NO: 41636 - protein, 85 aa, unidentified
  REGION 1..85: note = Description of Unknown:cds_NZ_WFIY01000004.1_cds_WP_155862678.1_474 target sequence
EGRLTQQASLSHSTILTKEYIKEAEQLKKISEFLDTLDIILELIEIKVETIIYIGYIVNDAPAVLEALRELKKNGEFLSPELSAL

SEQ ID NO: 41637 - protein, 85 aa, unidentified
  REGION 1..85: note = Description of Unknown:cds_NZ_WFIY01000004.1_cds_WP_155863357.1_1329 target sequence
LAVKIIGLGNRLYGDDAVGSLTAACMEELGLPAFDAGANGFQALSAIENGDIVFFIDIVQMDEEEGIFKVNLDEADFVEITDPHR

SEQ ID NO: 41638 - protein, 84 aa, unidentified
  REGION 1..84: note = Description of Unknown:cds_NZ_WFIY01000004.1_cds_WP_155863357.1_1329 target sequence
ITDPHRLTPLQVLSLSARANNRPKEAYIVGIKPEYIDWPGISDAVIKRLEKVLQKFKKFISTYGIEVDVDKVIQCVKSKSKEPW

SEQ ID NO: 41639 - protein, 85 aa, unidentified
  REGION 1..85: note = Description of Unknown:cds_NZ_WFIY01000004.1_cds_WP_155863357.1_1329 target sequence
ELGLPAFDAGANGFQALSAIENGDIVFFIDIVQMDEEEGIFKVNLDEADFVEITDPHRLTPLQVLSLSARANNRPKEAYIVGIKP

SEQ ID NO: 41640 - protein, 85 aa, unidentified
  REGION 1..85: note = Description of Unknown:cds_NZ_WFIY01000004.1_cds_WP_155863404.1_1382 target sequence
LSTIELKPIGYIEHNIPDELIAKTFKKFMAKVVVYTEYKDGLKGLDEFSHIVLISYLPRAKRESLQIKPLEPKIKANNLKIETNI

SEQ ID NO: 41641 - protein, 84 aa, unidentified
  REGION 1..84: note = Description of Unknown:cds_NZ_WFIY01000004.1_cds_WP_155863404.1_1382 target sequence
KIETNILTVGIFSTCAQYRPNPIGLSVVKLLKIQDNTIIINGCDLYNKTLILDIKPYIYTVSEEVRIAEWRKRMLEYIRTLNLE

SEQ ID NO: 41642 - protein, 85 aa, unidentified
  REGION 1..85: note = Description of Unknown:cds_NZ_WFIY01000004.1_cds_WP_155863404.1_1382 target sequence
FMAKVVVYTEYKDGLKGLDEFSHIVLISYLPRAKRESLQIKPLEPKIKANNLKIETNILTVGIFSTCAQYRPNPIGLSVVKLLKI

SEQ ID NO: 41643 - protein, 85 aa, unidentified
  REGION 1..85: note = Description of Unknown:cds_NZ_WFIY01000004.1_cds_WP_155863885.1_1791 target sequence
KIIEKDEKVKIHLKINGKDYETEVEPRKLLVHVLRDLGFTSVHVGCDTSNCGACTVIINGKSVKSCTVLAVQADGSEILTVEGLS

SEQ ID NO: 41644 - protein, 84 aa, unidentified
  REGION 1..84: note = Description of Unknown:cds_NZ_WFIY01000004.1_cds_WP_155863885.1_1791 target sequence
LTVEGLSKDGKLHPIQEAFWDKHALQCGYCTPGMIMQSYWLLSENPSPSEDEIREGLAGNLCRCTGYQNIIEAVKEASQKLKGH

SEQ ID NO: 41645 - protein, 85 aa, unidentified
  REGION 1..85: note = Description of Unknown:cds_NZ_WFIY01000004.1_cds_WP_155863885.1_1791 target sequence
KLLVHVLRDLGFTSVHVGCDTSNCGACTVIINGKSVKSCTVLAVQADGSEILTVEGLSKDGKLHPIQEAFWDKHALQCGYCTPGM

SEQ ID NO: 41646 - protein, 85 aa, unidentified
  REGION 1..85: note = Description of Unknown:cds_NZ_WFIY01000004.1_cds_WP_155864325.1_2329 target sequence
LIVNKGEKVKIRVKVNGIWYERYVSPRMLLVDFIRDELGLTGTKVGCDTTTCGACTVLLNGRSVKSCTVFAVQADGAEITTIEGL

SEQ ID NO: 41647 - protein, 84 aa, unidentified
  REGION 1..84: note = Description of Unknown:cds_NZ_WFIY01000004.1_cds_WP_155864325.1_2329 target sequence
ITTIEGLSVDSKLHPIQEAFKDNFALQCGFCTPGMIMQSYFLLKENPNPTEEEVKDGLHGNICRCTGYQNIIKAVLDASRRLRA

SEQ ID NO: 41648 - protein, 85 aa, unidentified
  REGION 1..85: note = Description of Unknown:cds_NZ_WFIY01000004.1_cds_WP_155864325.1_2329 target sequence
MLLVDFIRDELGLTGTKVGCDTTTCGACTVLLNGRSVKSCTVFAVQADGAEITTIEGLSVDSKLHPIQEAFKDNFALQCGFCTPG

SEQ ID NO: 41649 - protein, 85 aa, unidentified
  REGION 1..85: note = Description of Unknown:cds_NC_029316.1_cds_YP_009230277.1_24 target sequence
LQNMLLKNINTPPKEEIEKFRQMLFFKVAECTKDKNFAKCVINNIIENLKYIDVSILLYPQTKRKCRMIKGFENSQAEVIKYDDE

SEQ ID NO: 41650 - protein, 84 aa, unidentified
  REGION 1..84: note = Description of Unknown:cds_NC_029316.1_cds_YP_009230277.1_24 target sequence
VIKYDDEPYLLCTDVLLVYKLPDSIMTLLFTLSGNEIISSYVVSNIPQLPLKIEVPFNIEVVGDNHIYTVYRRNSSYGVKINEE

SEQ ID NO: 41651 - protein, 85 aa, unidentified
  REGION 1..85: note = Description of Unknown:cds_NC_029316.1_cds_YP_009230277.1_24 target sequence
VAECTKDKNFAKCVINNIIENLKYIDVSILLYPQTKRKCRMIKGFENSQAEVIKYDDEPYLLCTDVLLVYKLPDSIMTLLFTLSG

SEQ ID NO: 41652 - protein, 85 aa, unidentified
  REGION 1..85: note = Description of Unknown:cds_NC_029316.1_cds_YP_009230296.1_43 target sequence
NRSSNQVKPVLFIVYAIYIVYYNLLLSMIHKAVSMFANKYHNYLATIRARLIYSSNGGDNGDVKNHIETVKTVAVVVGALVIIFV

SEQ ID NO: 41653 - protein, 84 aa, unidentified
  REGION 1..84: note = Description of Unknown:cds_NC_029316.1_cds_YP_009230296.1_43 target sequence
ALVIIFVMVFFVSGFLGIQLLNEINPSSYSPGSAQYNLSTAVVHGIVGSVNSLPTVEDVLFTVVIIAVIFLLVGIIFQKFNVKF

SEQ ID NO: 41654 - protein, 85 aa, unidentified
  REGION 1..85: note = Description of Unknown:cds_NC_029316.1_cds_YP_009230296.1_43 target sequence
MIHKAVSMFANKYHNYLATIRARLIYSSNGGDNGDVKNHIETVKTVAVVVGALVIIFVMVFFVSGFLGIQLLNEINPSSYSPGSA

SEQ ID NO: 41655 - protein, 85 aa, unidentified
  REGION 1..85: note = Description of Unknown:cds_NC_010495.1_cds_YP_001742046.1_9 target sequence
MSILAKYWRPLAIIIIVVASVLWVRSEITSYGGQQYAAGYARAVAEQKAADEQEEQRRNAELQKIQADAQQRIDAARHDAVNAAA

SEQ ID NO: 41656 - protein, 84 aa, unidentified
  REGION 1..84: note = Description of Unknown:cds_NC_010495.1_cds_YP_001742046.1_9 target sequence
DAVNAAAKSGRLQQQLANIRKQLVGYSTAESIGNPAAETGVLLGDVLSKSVERNRQLADYADRAREAGLACEAQYNSLRNKKAP

SEQ ID NO: 41657 - protein, 85 aa, unidentified
  REGION 1..85: note = Description of Unknown:cds_NC_010495.1_cds_YP_001742046.1_9 target sequence
ITSYGGQQYAAGYARAVAEQKAADEQEEQRRNAELQKIQADAQQRIDAARHDAVNAAAKSGRLQQQLANIRKQLVGYSTAESIGN

SEQ ID NO: 41658 - protein, 85 aa, unidentified
  REGION 1..85: note = Description of Unknown:vpeps_3VCF_1 target sequence
ADIYIPTLEEIKRTLQLAKDYSENVYFIYRIALESGVRLSEILKVLKEPERDICGNDVCYYPLSWTRGYKGVFYVFHITPLKRVE

SEQ ID NO: 41659 - protein, 85 aa, unidentified
  REGION 1..85: note = Description of Unknown:vpeps_3VCF_1 target sequence
ITPLKRVEVTKWAIADFERRHKDAIAIKYFRKFVASKMAELSVPLDIIDFIQGRKPTRVLTQHYVSLFGIAKEQYKKYAEWLKGV

SEQ ID NO: 41660 - protein, 85 aa, unidentified
  REGION 1..85: note = Description of Unknown:vpeps_3VCF_1 target sequence
IYRIALESGVRLSEILKVLKEPERDICGNDVCYYPLSWTRGYKGVFYVFHITPLKRVEVTKWAIADFERRHKDAIAIKYFRKFVA

SEQ ID NO: 41661 - protein, 85 aa, unidentified
  REGION 1..85: note = Description of Unknown:cds_NZ_WFIY01000004.1_cds_WP_155862777.1_592 target sequence
QKLYTGRYVNLQALAQEINSILLQEGWESTMQPMMIGNPQYQDYIIRGLKKGHFHHAEELIVRVTGSPSEFRIIIEEEHIGPIGR

SEQ ID NO: 41662 - protein, 84 aa, unidentified
  REGION 1..84: note = Description of Unknown:cds_NZ_WFIY01000004.1_cds_WP_155862777.1_592 target sequence
EHIGPIGRELINRRLLTQIDKEINDGLFDLPMPTTQPINQQITPTVASQQPIAPQAPQQIRCPQCGYLNPPGAKFCINCGARLA

SEQ ID NO: 41663 - protein, 85 aa, unidentified
  REGION 1..85: note = Description of Unknown:cds_NZ_WFIY01000004.1_cds_WP_155862777.1_592 target sequence
ESTMQPMMIGNPQYQDYIIRGLKKGHFHHAEELIVRVTGSPSEFRIIIEEEHIGPIGRELINRRLLTQIDKEINDGLFDLPMPTT

SEQ ID NO: 41664 - protein, 85 aa, unidentified
  REGION 1..85: note = Description of Unknown:cds_NZ_WFIY01000004.1_cds_WP_155864259.1_2250 target sequence
KYAIWLDGVVLDVDLTELLYKKFKGDKNVNLPYTFNVHKDWEDFYNKMKGKDIVFLSPYDERTTKEIVEKVFKNDAIKFIPSMSK

SEQ ID NO: 41665 - protein, 84 aa, unidentified
  REGION 1..84: note = Description of Unknown:cds_NZ_WFIY01000004.1_cds_WP_155864259.1_2250 target sequence
KFIPSMSKPEKKCLGRLFSEFPEFQPLETAIIGSSPLDLLSARFYDSRIKVLCVNRYTSCAKYSPYLMASSLEELYDLMVKLKL

SEQ ID NO: 41666 - protein, 85 aa, unidentified
  REGION 1..85: note = Description of Unknown:cds_NZ_WFIY01000004.1_cds_WP_155864259.1_2250 target sequence
NVNLPYTFNVHKDWEDFYNKMKGKDIVFLSPYDERTTKEIVEKVFKNDAIKFIPSMSKPEKKCLGRLFSEFPEFQPLETAIIGSS

SEQ ID NO: 41667 - protein, 85 aa, unidentified
  REGION 1..85: note = Description of Unknown:cds_NC_030656.1_cds_YP_009268756.1_41 target sequence
ENVLIRDVSVLSDDSLTKFVHICALRLVENGSKHQYNALFVFIENTKSASFKQYAASALIAALHIRLRASKKHLPVLEKHREMIR

SEQ ID NO: 41668 - protein, 84 aa, unidentified
  REGION 1..84: note = Description of Unknown:cds_NC_030656.1_cds_YP_009268756.1_41 target sequence
EKHREMIRTWTASRNIVLEEVNKLVNSFNTKTSEDKHTAFINAVRCYASGNISGYLALKQMYLLHGHIPAKNMLEEIAILMNNA

SEQ ID NO: 41669 - protein, 85 aa, unidentified
  REGION 1..85: note = Description of Unknown:cds_NC_030656.1_cds_YP_009268756.1_41 target sequence
VENGSKHQYNALFVFIENTKSASFKQYAASALIAALHIRLRASKKHLPVLEKHREMIRTWTASRNIVLEEVNKLVNSFNTKTSED

SEQ ID NO: 41670 - protein, 85 aa, unidentified
  REGION 1..85: note = Description of Unknown:cds_NC_009884.1_cds_YP_001496970.1_45 target sequence
VTSMKSFSIVIANDKPHVDTNNTTSALLRKVDDETLNELLALVVIIVKKFYNPDYTIINFSFNADDNIKNHYNVYVTVYTDKSVL

SEQ ID NO: 41671 - protein, 84 aa, unidentified
  REGION 1..84: note = Description of Unknown:cds_NC_009884.1_cds_YP_001496970.1_45 target sequence
YTDKSVLYHNHFIVTDVSLNDTPLFVKIVYDSFIFPHIIHTTISKSLSVSAMLMPWSLSGNNDAVLRFYKRLRRAISNSFSIEH

SEQ ID NO: 41672 - protein, 85 aa, unidentified
  REGION 1..85: note = Description of Unknown:cds_NC_009884.1_cds_YP_001496970.1_45 target sequence
LRKVDDETLNELLALVVIIVKKFYNPDYTIINFSFNADDNIKNHYNVYVTVYTDKSVLYHNHFIVTDVSLNDTPLFVKIVYDSFI

SEQ ID NO: 41673 - protein, 85 aa, unidentified
  REGION 1..85: note = Description of Unknown:cds_NZ_WFIY01000004.1_cds_WP_155862632.1_413 target sequence
TYTPHVPYVPTPEPVVRKMLEIAKVGPEDIVYDLGCGDGRIVITAAKEFNAKKAVGIDINDERIKEALENVKKNGVEGKVIIEKG

SEQ ID NO: 41674 - protein, 84 aa, unidentified
  REGION 1..84: note = Description of Unknown:cds_NZ_WFIY01000004.1_cds_WP_155862632.1_413 target sequence
EGKVIIEKGNFFDIDLSEATVVTMFLLTNVNEMLKPKLEKELKPGTRVVSHEFEMRGWTPKEVVKVEDGNMNHIVYLYVIGEHK

SEQ ID NO: 41675 - protein, 85 aa, unidentified
  REGION 1..85: note = Description of Unknown:cds_NZ_WFIY01000004.1_cds_WP_155862632.1_413 target sequence
EDIVYDLGCGDGRIVITAAKEFNAKKAVGIDINDERIKEALENVKKNGVEGKVIIEKGNFFDIDLSEATVVTMFLLTNVNEMLKP

SEQ ID NO: 41676 - protein, 85 aa, unidentified
  REGION 1..85: note = Description of Unknown:cds_NZ_WFIY01000004.1_cds_WP_155864368.1_435 target sequence
KIKVVIFDADKTLWDHYNISEFEDPIKIINKNEIEDAKGRKLKVFPDVRETLEELKKKGIILGLATWNYPDKTQKILQILDLYKY

SEQ ID NO: 41677 - protein, 84 aa, unidentified
  REGION 1..84: note = Description of Unknown:cds_NZ_WFIY01000004.1_cds_WP_155864368.1_435 target sequence
LQILDLYKYFDVIVSRDFPYKFIMINEILSELRNKGIKIKPEETMFIDDRRSHFGNVWLYLGNIKCVEMWKDIKCHSEILHMLD

SEQ ID NO: 41678 - protein, 85 aa, unidentified
  REGION 1..85: note = Description of Unknown:cds_NZ_WFIY01000004.1_cds_WP_155864368.1_435 target sequence
IINKNEIEDAKGRKLKVFPDVRETLEELKKKGIILGLATWNYPDKTQKILQILDLYKYFDVIVSRDFPYKFIMINEILSELRNKG

SEQ ID NO: 41679 - protein, 85 aa, unidentified
  REGION 1..85: note = Description of Unknown:cds_NZ_WFIY01000004.1_cds_WP_155862702.1_502 target sequence
VNIDVVRIDIPEGTNVIIGQSHFIKTVEDLYETLASSSPSIKFGIAFNEASGKRLVRFDGNDEELIKLAIENAKRIGAGHTFVIY

SEQ ID NO: 41680 - protein, 84 aa, unidentified
  REGION 1..84: note = Description of Unknown:cds_NZ_WFIY01000004.1_cds_WP_155862702.1_502 target sequence
GAGHTFVIYIKNAYPINVLNRIKNVEEVVRIFAATANPLQVLVAETDQGRGVIGVVDGYTPLGVESDADIKERKEILRKFGYKR

SEQ ID NO: 41681 - protein, 85 aa, unidentified
  REGION 1..85: note = Description of Unknown:cds_NZ_WFIY01000004.1_cds_WP_155862702.1_502 target sequence
EDLYETLASSSPSIKFGIAFNEASGKRLVRFDGNDEELIKLAIENAKRIGAGHTFVIYIKNAYPINVLNRIKNVEEVVRIFAATA

SEQ ID NO: 41682 - protein, 85 aa, unidentified
  REGION 1..85: note = Description of Unknown:cds_NZ_WFIY01000004.1_cds_WP_155864388.1_829 target sequence
LAYKGKRGKCPLVSVTFDGYKLVDVDVEFITVDGDDATAAYKNLRKGDIKILDSIIVGGFNYIIPDNNYIIYYASKPDIDSILNA

SEQ ID NO: 41683 - protein, 84 aa, unidentified
  REGION 1..84: note = Description of Unknown:cds_NZ_WFIY01000004.1_cds_WP_155864388.1_829 target sequence
DIDSILNAARKHYNDKRVNVIKEFLSNMTALSTNRGTVYVNTDLDLKMVKNVIEYYQTFSKYPEPIKYAHIIGKAIGQSQLISD

SEQ ID NO: 41684 - protein, 85 aa, unidentified
  REGION 1..85: note = Description of Unknown:cds_NZ_WFIY01000004.1_cds_WP_155864388.1_829 target sequence
EFITVDGDDATAAYKNLRKGDIKILDSIIVGGFNYIIPDNNYIIYYASKPDIDSILNAARKHYNDKRVNVIKEFLSNMTALSTNR

SEQ ID NO: 41685 - protein, 85 aa, unidentified
  REGION 1..85: note = Description of Unknown:cds_NZ_WFIY01000004.1_cds_WP_155863097.1_1011 target sequence
LSQPGQTKTKELKTITKQVITPSVLKEDKKKVQLMYIIKIFGGISERALITLLYEASQKGLDLGYKFNIIGNNIFSPMIKEDLTS

SEQ ID NO: 41686 - protein, 84 aa, unidentified
  REGION 1..84: note = Description of Unknown:cds_NZ_WFIY01000004.1_cds_WP_155863097.1_1011 target sequence
MIKEDLTSLLYLGLIESDPVNKKLKLSTNGEEALEENQAVIDDNFKNQLNQILSEIKSKIVAIDEEYTLKLRNANRGYSRGRRY

SEQ ID NO: 41687 - protein, 85 aa, unidentified
  REGION 1..85: note = Description of Unknown:cds_NZ_WFIY01000004.1_cds_WP_155863097.1_1011 target sequence
DKKKVQLMYIIKIFGGISERALITLLYEASQKGLDLGYKFNIIGNNIFSPMIKEDLTSLLYLGLIESDPVNKKLKLSTNGEEALE

SEQ ID NO: 41688 - protein, 85 aa, unidentified
  REGION 1..85: note = Description of Unknown:cds_NZ_WFIY01000004.1_cds_WP_155863176.1_1107 target sequence
SFSPTTKGEYYMTVGIVAVVLILISLALGPLAPLDEPKVYAYDGKIYNLGDAVGVSFSAFISLMVFIISAVILWGSKNPWYNIII

SEQ ID NO: 41689 - protein, 84 aa, unidentified
  REGION 1..84: note = Description of Unknown:cds_NZ_WFIY01000004.1_cds_WP_155863176.1_1107 target sequence
KNPWYNIIIDSSAISFIFLNYLNYAVIYLTWHPQMYILPFFIEIIYNGAKALQLDLGQVVLIILLYRVYKIMKMPRPLFGSEKQ

SEQ ID NO: 41690 - protein, 85 aa, unidentified
  REGION 1..85: note = Description of Unknown:cds_NZ_WFIY01000004.1_cds_WP_155863176.1_1107 target sequence
LGPLAPLDEPKVYAYDGKIYNLGDAVGVSFSAFISLMVFIISAVILWGSKNPWYNIIIDSSAISFIFLNYLNYAVIYLTWHPQMY

SEQ ID NO: 41691 - protein, 85 aa, unidentified
  REGION 1..85: note = Description of Unknown:cds_NZ_WFIY01000004.1_cds_WP_155863801.1_1684 target sequence
EINSRNIILDTAGFLAGLENLLNKVYTTPYVINEVKDLASRNSLSLATSSGKVIVMEPSKNSINKVLKAIKEINEQTLSKTDISI

SEQ ID NO: 41692 - protein, 84 aa, unidentified
  REGION 1..84: note = Description of Unknown:cds_NZ_WFIY01000004.1_cds_WP_155863801.1_1684 target sequence
TLSKTDISIIALSLDLSPSLVFTDDLSLQNVLLRFNIPFKSVKLNKIAINEKKFIYICQDCKRKFNQYLKECPYCGGKIVKANK

SEQ ID NO: 41693 - protein, 85 aa, unidentified
  REGION 1..85: note = Description of Unknown:cds_NZ_WFIY01000004.1_cds_WP_155863801.1_1684 target sequence
TPYVINEVKDLASRNSLSLATSSGKVIVMEPSKNSINKVLKAIKEINEQTLSKTDISIIALSLDLSPSLVFTDDLSLQNVLLRFN

SEQ ID NO: 41694 - protein, 85 aa, unidentified
  REGION 1..85: note = Description of Unknown:cds_NZ_WFIY01000004.1_cds_WP_155863834.1_1728 target sequence
LNCEDELKEAMILAWIGDREGVNEITKECVKELSPYRSAIKDIMKIKEEVNREFEIPKKLREKRITYEDLLGLALLRLARKISLT

SEQ ID NO: 41695 - protein, 84 aa, unidentified
  REGION 1..84: note = Description of Unknown:cds_NZ_WFIY01000004.1_cds_WP_155863834.1_1728 target sequence
LARKISLTSDLNPKNDGKIKYTIIDLGNKKILRGYCKECKGFHYTILKDNIGFAVEYDQIIYAEFLQGDEKSVMDVIKTEIINK

SEQ ID NO: 41696 - protein, 85 aa, unidentified
  REGION 1..85: note = Description of Unknown:cds_NZ_WFIY01000004.1_cds_WP_155863834.1_1728 target sequence
ECVKELSPYRSAIKDIMKIKEEVNREFEIPKKLREKRITYEDLLGLALLRLARKISLTSDLNPKNDGKIKYTIIDLGNKKILRGY

SEQ ID NO: 41697 - protein, 85 aa, unidentified
  REGION 1..85: note = Description of Unknown:cds_NZ_WFIY01000004.1_cds_WP_155864032.1_1966 target sequence
IIEGKVMKFGDKIDTDVIIPARYLKFTDPQYLAQHAMEPLDPEFYKKASSGVVIVAGKVFGMGSSREQAAIALKAAGVRAIIAES

SEQ ID NO: 41698 - protein, 84 aa, unidentified
  REGION 1..84: note = Description of Unknown:cds_NZ_WFIY01000004.1_cds_WP_155864032.1_1966 target sequence
GVRAIIAESFARIFYRNAINNGLPVITLNDATKLIDEGEIVRINVETGEIEVNGRKYQGKGISGMALEILKSGGIMEYLKSEKF

SEQ ID NO: 41699 - protein, 85 aa, unidentified
  REGION 1..85: note = Description of Unknown:cds_NZ_WFIY01000004.1_cds_WP_155864032.1_1966 target sequence
DPQYLAQHAMEPLDPEFYKKASSGVVIVAGKVFGMGSSREQAAIALKAAGVRAIIAESFARIFYRNAINNGLPVITLNDATKLID

SEQ ID NO: 41700 - protein, 85 aa, unidentified
  REGION 1..85: note = Description of Unknown:cds_NZ_WFIY01000004.1_cds_WP_155864151.1_2105 target sequence
SSNEDEKNKKTVTIRGVDKSIYERAVMTARETGRTVGEIVNQALSSFLGLTSKATNAVTQVVQGVKETGKSFVQGFEDAKKDVVV

SEQ ID NO: 41701 - protein, 84 aa, unidentified
  REGION 1..84: note = Description of Unknown:cds_NZ_WFIY01000004.1_cds_WP_155864151.1_2105 target sequence
EDAKKDVVVISDVQELSVTRDEILQVGKPISFRNIKKLTLNIDQEALNYVDSIIGVDELVIPSTINKIILLQKCKFVKKISTIS

SEQ ID NO: 41702 - protein, 85 aa, unidentified
  REGION 1..85: note = Description of Unknown:cds_NZ_WFIY01000004.1_cds_WP_155864151.1_2105 target sequence
TARETGRTVGEIVNQALSSFLGLTSKATNAVTQVVQGVKETGKSFVQGFEDAKKDVVVISDVQELSVTRDEILQVGKPISFRNIK

SEQ ID NO: 41703 - protein, 85 aa, unidentified
  REGION 1..85: note = Description of Unknown:cds_NZ_WFIY01000004.1_cds_WP_155864265.1_2257 target sequence
QLPKEIEDLIKKEAKERGIDEEVLLIDKLSKDLDPQTRYKLYKEKAKELLAEAKKYLESKDFIQASEKAWGACASIVKAYAEKKG

SEQ ID NO: 41704 - protein, 84 aa, unidentified
  REGION 1..84: note = Description of Unknown:cds_NZ_WFIY01000004.1_cds_WP_155864265.1_2257 target sequence
VKAYAEKKGLEHYRHRQLEEIMSGIISQMNGDKELISEWSTCLRLHSNFYDNFMTEKDLYSSIELVENFVKNMERILEMKDRDL

SEQ ID NO: 41705 - protein, 85 aa, unidentified
  REGION 1..85: note = Description of Unknown:cds_NZ_WFIY01000004.1_cds_WP_155864265.1_2257 target sequence
KLSKDLDPQTRYKLYKEKAKELLAEAKKYLESKDFIQASEKAWGACASIVKAYAEKKGLEHYRHRQLEEIMSGIISQMNGDKELI

SEQ ID NO: 41706 - protein, 85 aa, unidentified
  REGION 1..85: note = Description of Unknown:cds_NC_007409.1_cds_YP_319861.1_30 target sequence
IRQTKTIRVFLKPKSKMVFDNERTKEIRKKHPYWFVQGDLRVNKTAVIFFSDTQGKKGIPYVPVSPGKYQVEYYDDKIVITKLMT

SEQ ID NO: 41707 - protein, 84 aa, unidentified
  REGION 1..84: note = Description of Unknown:cds_NC_007409.1_cds_YP_319861.1_30 target sequence
KIVITKLMTLQKIYTCLVFPISRKAYLLDEYTIVDSTAEKNAINIYFDRPMKYKKEKMSGTWYKYIFEEDISTYFMQAKARIKS

SEQ ID NO: 41708 - protein, 85 aa, unidentified
  REGION 1..85: note = Description of Unknown:cds_NC_007409.1_cds_YP_319861.1_30 target sequence
RKKHPYWFVQGDLRVNKTAVIFFSDTQGKKGIPYVPVSPGKYQVEYYDDKIVITKLMTLQKIYTCLVFPISRKAYLLDEYTIVDS

SEQ ID NO: 41709 - protein, 85 aa, unidentified
  REGION 1..85: note = Description of Unknown:cds_NC_007409.1_cds_YP_319876.1_45 target sequence
TLYDTVKELQEKLRNGEIEINTFLERLGLTLDSIWSQKLRVTGLFKYNVIKATLLSIAKTTCMYYFNKIPDVEAEDSIITTLTKI

SEQ ID NO: 41710 - protein, 84 aa, unidentified
  REGION 1..84: note = Description of Unknown:cds_NC_007409.1_cds_YP_319876.1_45 target sequence
SIITTLTKIYSFISQNVKENRDKFETELVAFGKQNEIKSVADSIMIMIVENLMASLGYTETEKKYIPISDFMIRLQNIQNTTGS

SEQ ID NO: 41711 - protein, 85 aa, unidentified
  REGION 1..85: note = Description of Unknown:cds_NC_007409.1_cds_YP_319876.1_45 target sequence
GLTLDSIWSQKLRVTGLFKYNVIKATLLSIAKTTCMYYFNKIPDVEAEDSIITTLTKIYSFISQNVKENRDKFETELVAFGKQNE

SEQ ID NO: 41712 - protein, 85 aa, unidentified
  REGION 1..85: note = Description of Unknown:cds_NC_010495.1_cds_YP_001742078.1_41 target sequence
ARGVNKVIIVGTLGNDPEVKYSASGSAIANLSVATSEQWKDKQTGEKKEHTEWHRVVIFGKIAEVAGEYLRKGSQVYIEGQLRTR

SEQ ID NO: 41713 - protein, 84 aa, unidentified
  REGION 1..84: note = Description of Unknown:cds_NC_010495.1_cds_YP_001742078.1_41 target sequence
YIEGQLRTRKWTDSSGVDKYTTEIVIPQMGGVMQMLGGKRDDSDQQQRQQSGQQPQRQQQHQTKQQSPQVGNEPPIGFDEDIPF

SEQ ID NO: 41714 - protein, 85 aa, unidentified
  REGION 1..85: note = Description of Unknown:cds_NC_010495.1_cds_YP_001742078.1_41 target sequence
IANLSVATSEQWKDKQTGEKKEHTEWHRVVIFGKIAEVAGEYLRKGSQVYIEGQLRTRKWTDSSGVDKYTTEIVIPQMGGVMQML

SEQ ID NO: 41715 - protein, 85 aa, unidentified
  REGION 1..85: note = Description of Unknown:vpeps_4U4I_1 target sequence
GPGSSRYDFFNVVTAICQLDKPHDYGYAIFTQLPDCTEIQFHLKNLPPGKHGCHIHKSGDRRNGCTSMGPHFNPFNGVHKDINIQ

SEQ ID NO: 41716 - protein, 85 aa, unidentified
  REGION 1..85: note = Description of Unknown:vpeps_4U4I_1 target sequence
GVHKDINIQHNHLGDLGNIVVNNNGECNEIICVKYLPLTGSNQIIGRGLVIHEKEDDLGMTNHPDSKTTGNSGDRIACGIIAYLN

SEQ ID NO: 41717 - protein, 85 aa, unidentified
  REGION 1..85: note = Description of Unknown:vpeps_4U4I_1 target sequence
AIFTQLPDCTEIQFHLKNLPPGKHGCHIHKSGDRRNGCTSMGPHFNPFNGVHKDINIQHNHLGDLGNIVVNNNGECNEIICVKYL

SEQ ID NO: 41718 - protein, 85 aa, unidentified
  REGION 1..85: note = Description of Unknown:cds_NC_038931.1_cds_YP_009509137.1_21 target sequence
VEIKLVNKEIIKFGLALGIVNELNEYLYAAMPPMYDILSKLYGYGRTVNAMLYSVLFNLLESRIDTLRRLDLSKFFAVVAYMDAV

SEQ ID NO: 41719 - protein, 84 aa, unidentified
  REGION 1..84: note = Description of Unknown:cds_NC_038931.1_cds_YP_009509137.1_21 target sequence
FAVVAYMDAVKDTVELAINGYAYVTTSGFTVYPASQITGTYESDFSQAKAVPANTTATQVWFAPKKFALITQNKIYTFLAPYWF

SEQ ID NO: 41720 - protein, 85 aa, unidentified
  REGION 1..85: note = Description of Unknown:cds_NC_038931.1_cds_YP_009509137.1_21 target sequence
YAAMPPMYDILSKLYGYGRTVNAMLYSVLFNLLESRIDTLRRLDLSKFFAVVAYMDAVKDTVELAINGYAYVTTSGFTVYPASQI

SEQ ID NO: 41721 - protein, 85 aa, unidentified
  REGION 1..85: note = Description of Unknown:cds_NZ_WFIY01000004.1_cds_WP_155862745.1_556 target sequence
VLIINDSRFVGKYVAIDSNDRIIGYADTREELVKNLEQKGYKIHEYSILYIPSQFKLHIEYSKVCDEELPLMNLKINCNSNSFRA

SEQ ID NO: 41722 - protein, 84 aa, unidentified
  REGION 1..84: note = Description of Unknown:cds_NZ_WFIY01000004.1_cds_WP_155862745.1_556 target sequence
NCNSNSFRAIATFGNTNLINKEIAEFCGIYEEGEIEVEIGIIKKKIKVKVADLNKVDLPIVPGLILSPTNFIVCFYDNYFEISD

SEQ ID NO: 41723 - protein, 85 aa, unidentified
  REGION 1..85: note = Description of Unknown:cds_NZ_WFIY01000004.1_cds_WP_155862745.1_556 target sequence
TREELVKNLEQKGYKIHEYSILYIPSQFKLHIEYSKVCDEELPLMNLKINCNSNSFRAIATFGNTNLINKEIAEFCGIYEEGEIE

SEQ ID NO: 41724 - protein, 85 aa, unidentified
  REGION 1..85: note = Description of Unknown:cds_NZ_WFIY01000004.1_cds_WP_155863267.1_1221 target sequence
VWEEVFGNKLDDKDIKILKILNEDANISDAKIGKLIGLSKTSVRVRRIRLQNSGILKIVGVVILQNLNIPYADILVKLRNDLGMR

SEQ ID NO: 41725 - protein, 84 aa, unidentified
  REGION 1..84: note = Description of Unknown:cds_NZ_WFIY01000004.1_cds_WP_155863267.1_1221 target sequence
VKLRNDLGMRNDFLRRLLDNDLVYEVTEYMGDWDLLIRIFHKDASSLKEEVLKIINDKAVVDYRLNLAVKTYKAWGKSVLISSI

SEQ ID NO: 41726 - protein, 85 aa, unidentified
  REGION 1..85: note = Description of Unknown:cds_NZ_WFIY01000004.1_cds_WP_155863267.1_1221 target sequence
SDAKIGKLIGLSKTSVRVRRIRLQNSGILKIVGVVILQNLNIPYADILVKLRNDLGMRNDFLRRLLDNDLVYEVTEYMGDWDLLI

SEQ ID NO: 41727 - protein, 85 aa, unidentified
  REGION 1..85: note = Description of Unknown:cds_NZ_WFIY01000004.1_cds_WP_155863913.1_1825 target sequence
SSRELQEDKWPGKFEITDDDIKEVEDFMLKIINGDSYYEDRNNNNENLHTLTYNVKEQFKKSLTDEILDKGYVIMNNQNISINAH

SEQ ID NO: 41728 - protein, 84 aa, unidentified
  REGION 1..84: note = Description of Unknown:cds_NZ_WFIY01000004.1_cds_WP_155863913.1_1825 target sequence
NNQNISINAHPNLVKIPFDDERSIVTFKDTIELLLSLFSIYKEEENIEDKIPKRLVPLFILLKRSGLIYFDWKDKKYKLTTNYR

SEQ ID NO: 41729 - protein, 85 aa, unidentified
  REGION 1..85: note = Description of Unknown:cds_NZ_WFIY01000004.1_cds_WP_155863913.1_1825 target sequence
MLKIINGDSYYEDRNNNNENLHTLTYNVKEQFKKSLTDEILDKGYVIMNNQNISINAHPNLVKIPFDDERSIVTFKDTIELLLSL

SEQ ID NO: 41730 - protein, 85 aa, unidentified
  REGION 1..85: note = Description of Unknown:cds_NZ_WFIY01000004.1_cds_WP_155863958.1_1879 target sequence
ILSHQSIKEIITKGVIGNYSEESIRENGYDLRICGEKYYEVEGNAELPIKKSEIKEIEFKEFAFFYPGKTYLFETCEEFNMPNDL

SEQ ID NO: 41731 - protein, 84 aa, unidentified
  REGION 1..84: note = Description of Unknown:cds_NZ_WFIY01000004.1_cds_WP_155863958.1_1879 target sequence
CEEFNMPNDLAALITLRSTLARNGFILPPTVIDAGYKGKITLALSSFYHNRIAKGTRTAHIIFLKLDKPTEKSYNGKYQGGVVI

SEQ ID NO: 41732 - protein, 85 aa, unidentified
  REGION 1..85: note = Description of Unknown:cds_NZ_WFIY01000004.1_cds_WP_155863958.1_1879 target sequence
GYDLRICGEKYYEVEGNAELPIKKSEIKEIEFKEFAFFYPGKTYLFETCEEFNMPNDLAALITLRSTLARNGFILPPTVIDAGYK

SEQ ID NO: 41733 - protein, 85 aa, unidentified
  REGION 1..85: note = Description of Unknown:cds_NC_029316.1_cds_YP_009230304.1_51 target sequence
STIVIDSKEKLREFVPPLDAEILTIRCNFENEIMKNICYSHVSTRMVMQGYTTFRIAEGILGDSEFEIYPNIHHLPVTLYGKGSI

SEQ ID NO: 41734 - protein, 84 aa, unidentified
  REGION 1..84: note = Description of Unknown:cds_NC_029316.1_cds_YP_009230304.1_51 target sequence
PVTLYGKGSIIKCELGGDKEISEYINKLKTDGILILHGKGNCICNAVLSYYFSSSSDIVIMTDIVDDKIMGVLSKSLKKVIIFY

SEQ ID NO: 41735 - protein, 85 aa, unidentified
  REGION 1..85: note = Description of Unknown:cds_NC_029316.1_cds_YP_009230304.1_51 target sequence
NFENEIMKNICYSHVSTRMVMQGYTTFRIAEGILGDSEFEIYPNIHHLPVTLYGKGSIIKCELGGDKEISEYINKLKTDGILILH

SEQ ID NO: 41736 - protein, 85 aa, unidentified
  REGION 1..85: note = Description of Unknown:cds_NC_030656.1_cds_YP_009268851.1_136 target sequence
YFPEKENDIIEFPLIPPQIPPQVAPRTSVRNSVRDRACARPFNQCTSINPCNSTGITVTYCDGSPRTIEEVYVVTNDVTLRVLLN

SEQ ID NO: 41737 - protein, 84 aa, unidentified
  REGION 1..84: note = Description of Unknown:cds_NC_030656.1_cds_YP_009268851.1_136 target sequence
NDVTLRVLLNNENIEVLKCVCKLACVSMGLQPKFKTYEHNKNLLEMTVTGNGISWPTKLLAKISKDIVSVDETKQLREPVIKIN

SEQ ID NO: 41738 - protein, 85 aa, unidentified
  REGION 1..85: note = Description of Unknown:cds_NC_030656.1_cds_YP_009268851.1_136 target sequence
SVRNSVRDRACARPFNQCTSINPCNSTGITVTYCDGSPRTIEEVYVVTNDVTLRVLLNNENIEVLKCVCKLACVSMGLQPKFKTY

SEQ ID NO: 41739 - protein, 85 aa, unidentified
  REGION 1..85: note = Description of Unknown:cds_NZ_WFIY01000004.1_cds_WP_013777039.1_1759 target sequence
YVIDPAARVADLIGLLSTLQGTFGGKTDLYMLEKEMEVDLDDLMPIVYTASYLGFVTVGEGDIIITDKGMEFLNANIRKRKEILR

SEQ ID NO: 41740 - protein, 84 aa, unidentified
  REGION 1..84: note = Description of Unknown:cds_NZ_WFIY01000004.1_cds_WP_013777039.1_1759 target sequence
ANIRKRKEILRESLVKVEPFITAIELKTFSLESLKEALEKKGIFVYNTPEGDYDLQMTLTEWGVYSGLISRYDDNMYKVNYEKA

SEQ ID NO: 41741 - protein, 85 aa, unidentified
  REGION 1..85: note = Description of Unknown:cds_NZ_WFIY01000004.1_cds_WP_013777039.1_1759 target sequence
DLYMLEKEMEVDLDDLMPIVYTASYLGFVTVGEGDIIITDKGMEFLNANIRKRKEILRESLVKVEPFITAIELKTFSLESLKEAL

SEQ ID NO: 41742 - protein, 85 aa, unidentified
  REGION 1..85: note = Description of Unknown:cds_NZ_WFIY01000004.1_cds_WP_155864112.1_2063 target sequence
ENLGQALNTSLKHKLSIKFLEQSENFLSNSELSNLIEEIIYYYRVFGNPNLDKISNHIMEKSDKIRKEIEDLFSVITTINEIRYK

SEQ ID NO: 41743 - protein, 84 aa, unidentified
  REGION 1..84: note = Description of Unknown:cds_NZ_WFIY01000004.1_cds_WP_155864112.1_2063 target sequence
VITTINEIRYKSKELRKSAKELRILSISASILILGNYEIIKFGDYSLSILLPLGLGISILMALIFHMFYVWFSTCRSTKNILKT

SEQ ID NO: 41744 - protein, 85 aa, unidentified
  REGION 1..85: note = Description of Unknown:cds_NZ_WFIY01000004.1_cds_WP_155864112.1_2063 target sequence
SNSELSNLIEEIIYYYRVFGNPNLDKISNHIMEKSDKIRKEIEDLFSVITTINEIRYKSKELRKSAKELRILSISASILILGNYE

SEQ ID NO: 41745 - protein, 85 aa, unidentified
  REGION 1..85: note = Description of Unknown:cds_NC_035460.1_cds_YP_009407952.1_1 target sequence
ELGHEGSYLSKDNINNNNNNIIAIVLEYFIWVSKYDIEIQSKVFKALQTFESDAKIVFGHNYKNIVKTFNLDTVFGIETTCETIK

SEQ ID NO: 41746 - protein, 84 aa, unidentified
  REGION 1..84: note = Description of Unknown:cds_NC_035460.1_cds_YP_009407952.1_1 target sequence
FGIETTCETIKLFLTTEFQWYYKGRTMQEACGIIYILAEAIKYWHFEKNINIINEIVSILYKLIDTEDAWMFVRIAIECRINKM

SEQ ID NO: 41747 - protein, 85 aa, unidentified
  REGION 1..85: note = Description of Unknown:cds_NC_035460.1_cds_YP_009407952.1_1 target sequence
YFIWVSKYDIEIQSKVFKALQTFESDAKIVFGHNYKNIVKTFNLDTVFGIETTCETIKLFLTTEFQWYYKGRTMQEACGIIYILA

SEQ ID NO: 41748 - protein, 85 aa, unidentified
  REGION 1..85: note = Description of Unknown:cds_NC_035460.1_cds_YP_009407956.1_5 target sequence
NPFNKMDRDFLDYEDIEDLDYYPSFISIKTILQHYLIWRAKEVKDTPGLLFKELLKYDELAKWRFSDLDFKVAYDMFAYYDKYDL

SEQ ID NO: 41749 - protein, 84 aa, unidentified
  REGION 1..84: note = Description of Unknown:cds_NC_035460.1_cds_YP_009407956.1_5 target sequence
DMFAYYDKYDLIWKIPDYMTEDLLIDAKEVIGLLGILAESMGEKLCCYALFNMFNSLFERLNTSILNILKTELEFLYVRHKYEI

SEQ ID NO: 41750 - protein, 85 aa, unidentified
  REGION 1..85: note = Description of Unknown:cds_NC_035460.1_cds_YP_009407956.1_5 target sequence
IKTILQHYLIWRAKEVKDTPGLLFKELLKYDELAKWRFSDLDFKVAYDMFAYYDKYDLIWKIPDYMTEDLLIDAKEVIGLLGILA

SEQ ID NO: 41751 - protein, 85 aa, unidentified
  REGION 1..85: note = Description of Unknown:cds_NC_035460.1_cds_YP_009407960.1_9 target sequence
TTLSCYYLAKNSLTNEDSIVLAVQDFITWCSLGFRHRQPGGNVFRVLSTCRIDATKVFGTIDEWRCLSRSFNLDTATNNNLVNIK

SEQ ID NO: 41752 - protein, 84 aa, unidentified
  REGION 1..84: note = Description of Unknown:cds_NC_035460.1_cds_YP_009407960.1_9 target sequence
TATNNNLVNIKSIIKDYCKGQSAVTSVCAIIGFLSYVAEFWGGENQPNNTTTHVLTLLHSLIKSRSDFALVKGAMKCRLKKIMN

SEQ ID NO: 41753 - protein, 85 aa, unidentified
  REGION 1..85: note = Description of Unknown:cds_NC_035460.1_cds_YP_009407960.1_9 target sequence
TWCSLGFRHRQPGGNVFRVLSTCRIDATKVFGTIDEWRCLSRSFNLDTATNNNLVNIKSIIKDYCKGQSAVTSVCAIIGFLSYVA

SEQ ID NO: 41754 - protein, 85 aa, unidentified
  REGION 1..85: note = Description of Unknown:cds_NC_009884.1_cds_YP_001496954.1_29 target sequence
VTTPLCYSSPVNTPLSPSLLLLSLLLLLSTICGVLPLSLFCCGIGTGITLFNFDDTSDIIAVDIASAICFIIFCNGFCCCCCSGD

SEQ ID NO: 41755 - protein, 84 aa, unidentified
  REGION 1..84: note = Description of Unknown:cds_NC_009884.1_cds_YP_001496954.1_29 target sequence
GFCCCCCSGDPPYASSTTSLAICDGMLSLLRGDPPPVAVTYAPIFIAFCMHNSMSLIESKSGLTAFLTRVTMTSSMLPFSSIIS

SEQ ID NO: 41756 - protein, 85 aa, unidentified
  REGION 1..85: note = Description of Unknown:cds_NC_009884.1_cds_YP_001496954.1_29 target sequence
LSTICGVLPLSLFCCGIGTGITLFNFDDTSDIIAVDIASAICFIIFCNGFCCCCCSGDPPYASSTTSLAICDGMLSLLRGDPPPV

SEQ ID NO: 41757 - protein, 85 aa, unidentified
  REGION 1..85: note = Description of Unknown:hvTR_P03126 target sequence
HQKRTAMFQDPQERPRKLPQLCTELQTTIHDIILECVYCKQQLLRREVYDFAFRDLCIVYRDGNPYAVCDKCLKFYSKISEYRHY

SEQ ID NO: 41758 - protein, 84 aa, unidentified
  REGION 1..84: note = Description of Unknown:hvTR_P03126 target sequence
KFYSKISEYRHYCYSLYGTTLEQQYNKPLCDLLIRCINCQKPLCPEEKQRHLDKKQRFHNIRGRWTGRCMSCCRSSRTRRETQL

SEQ ID NO: 41759 - protein, 85 aa, unidentified
  REGION 1..85: note = Description of Unknown:hvTR_P03126 target sequence
TIHDIILECVYCKQQLLRREVYDFAFRDLCIVYRDGNPYAVCDKCLKFYSKISEYRHYCYSLYGTTLEQQYNKPLCDLLIRCINC

SEQ ID NO: 41760 - protein, 85 aa, unidentified
  REGION 1..85: note = Description of Unknown:cds_NZ_WFIY01000004.1_cds_WP_155862858.1_696 target sequence
PLVGVIMGSKSDWEYMKEAVDILKSFGVSYEVKVVSAHRTPEFMVEYAKTARSRGIEVIIAGAGGAAHLPGMTASLTTLPVIGVP

SEQ ID NO: 41761 - protein, 84 aa, unidentified
  REGION 1..84: note = Description of Unknown:cds_NZ_WFIY01000004.1_cds_WP_155862858.1_696 target sequence
ASLTTLPVIGVPIPSKNLNGLDSLLSIVQMPYGVPVATVAIGGAKNAALLAIRILSIKYKDLEEKLNKFMEDMRNDVLSTSLQA

SEQ ID NO: 41762 - protein, 85 aa, unidentified
  REGION 1..85: note = Description of Unknown:cds_NZ_WFIY01000004.1_cds_WP_155862858.1_696 target sequence
VSYEVKVVSAHRTPEFMVEYAKTARSRGIEVIIAGAGGAAHLPGMTASLTTLPVIGVPIPSKNLNGLDSLLSIVQMPYGVPVATV

SEQ ID NO: 41763 - protein, 85 aa, unidentified
  REGION 1..85: note = Description of Unknown:cds_NZ_WFIY01000004.1_cds_WP_155863208.1_1149 target sequence
ITLIIVRHGEAEPQIDGKDDKDRKLIKKGLKQMRRVANFLDELDYTFDRVLSSPYIRAYQSAEAILDELGVNDKKIETFNELSPE

SEQ ID NO: 41764 - protein, 84 aa, unidentified
  REGION 1..84: note = Description of Unknown:cds_NZ_WFIY01000004.1_cds_WP_155863208.1_1149 target sequence
KKIETFNELSPEKEPSAFIEKLKEMDNTTLLVVGHEPYLSSLIRTITGGNVELKKGGVAIVDYNPVEGKGVLKMLLTQKVLKLI

SEQ ID NO: 41765 - protein, 85 aa, unidentified
  REGION 1..85: note = Description of Unknown:cds_NZ_WFIY01000004.1_cds_WP_155863208.1_1149 target sequence
KGLKQMRRVANFLDELDYTFDRVLSSPYIRAYQSAEAILDELGVNDKKIETFNELSPEKEPSAFIEKLKEMDNTTLLVVGHEPYL

SEQ ID NO: 41766 - protein, 85 aa, unidentified
  REGION 1..85: note = Description of Unknown:cds_NZ_WFIY01000004.1_cds_WP_155863436.1_1411 target sequence
LKIPVIAFLGYLYQGDYSIPIKLADELKAKGLDVLDLSLGAMKAADILRILSPNKLIILTADKKGKKELRIYKPDDIENKISTWI

SEQ ID NO: 41767 - protein, 84 aa, unidentified
  REGION 1..84: note = Description of Unknown:cds_NZ_WFIY01000004.1_cds_WP_155863436.1_1411 target sequence
DDIENKISTWIDVISSMSAYYMDINSFLKVAKSLDVLPEDTTIIECEVELDEGIQLSEWGKECLELMKKKIIEYLGDYPTFSQG

SEQ ID NO: 41768 - protein, 85 aa, unidentified
  REGION 1..85: note = Description of Unknown:cds_NZ_WFIY01000004.1_cds_WP_155863436.1_1411 target sequence
KAKGLDVLDLSLGAMKAADILRILSPNKLIILTADKKGKKELRIYKPDDIENKISTWIDVISSMSAYYMDINSFLKVAKSLDVLP

SEQ ID NO: 41769 - protein, 85 aa, unidentified
  REGION 1..85: note = Description of Unknown:cds_NC_035460.1_cds_YP_009407959.1_8 target sequence
GAYTSIMNINDFNKIYAYKQDYRCKYNVSYELANEKIIREDLPLSFYIESFMRWYAQQRIQSVYTVNPVYKECLSCVNYARAKIP

SEQ ID NO: 41770 - protein, 84 aa, unidentified
  REGION 1..84: note = Description of Unknown:cds_NC_035460.1_cds_YP_009407959.1_8 target sequence
LSCVNYARAKIPLSKFNKAINHYNSDNNSVYLVDVRKYNNMQKLQLYIGFYSYVTTKLKSEDAIKRCIHTCTYISDEKTKLEFM

SEQ ID NO: 41771 - protein, 85 aa, unidentified
  REGION 1..85: note = Description of Unknown:cds_NC_035460.1_cds_YP_009407959.1_8 target sequence
VSYELANEKIIREDLPLSFYIESFMRWYAQQRIQSVYTVNPVYKECLSCVNYARAKIPLSKFNKAINHYNSDNNSVYLVDVRKYN

SEQ ID NO: 41772 - protein, 85 aa, unidentified
  REGION 1..85: note = Description of Unknown:cds_NC_003214.2_cds_NP_445728.1_63 target sequence
ISIADYFRQKDCDYWREYPHSYGKLDVFGKTIQIVGADCGSSALYFLMRGAKYIIQYEKEEHLRKRWEEACKYFNICDKAMMKNE

SEQ ID NO: 41773 - protein, 84 aa, unidentified
  REGION 1..84: note = Description of Unknown:cds_NC_003214.2_cds_NP_445728.1_63 target sequence
FNICDKAMMKNEWNGEYENADIFVIDCEGCEEHLNVDILKKYEQWCVGIHDWTKNRVELMRKMEGTIFTYVSDDGREMTLCKTS

SEQ ID NO: 41774 - protein, 85 aa, unidentified
  REGION 1..85: note = Description of Unknown:cds_NC_003214.2_cds_NP_445728.1_63 target sequence
FGKTIQIVGADCGSSALYFLMRGAKYIIQYEKEEHLRKRWEEACKYFNICDKAMMKNEWNGEYENADIFVIDCEGCEEHLNVDIL

SEQ ID NO: 41775 - protein, 85 aa, unidentified
  REGION 1..85: note = Description of Unknown:cds_NC_029316.1_cds_YP_009230283.1_30 target sequence
GILYNLVNSVFLAGEGVTIAGLAINILVNLIPCIQTSIPPSVYATISSMTLLNFLFNILHNPFVSVALSGVGAIVSFVVSLSSSV

SEQ ID NO: 41776 - protein, 84 aa, unidentified
  REGION 1..84: note = Description of Unknown:cds_NC_029316.1_cds_YP_009230283.1_30 target sequence
IVSFVVSLSSSVESYIQASMYAVYASLIFGNLDWFLVWATTVISSSGLAIATQAIYLIGVIDSIVGIAQVIYILMVLGIIPNTL

SEQ ID NO: 41777 - protein, 85 aa, unidentified
  REGION 1..85: note = Description of Unknown:cds_NC_029316.1_cds_YP_009230283.1_30 target sequence
VNLIPCIQTSIPPSVYATISSMTLLNFLFNILHNPFVSVALSGVGAIVSFVVSLSSSVESYIQASMYAVYASLIFGNLDWFLVWA

SEQ ID NO: 41778 - protein, 85 aa, unidentified
  REGION 1..85: note = Description of Unknown:cds_NC_030656.1_cds_YP_009268832.1_117 target sequence
QTKDIKKIVISAYDIGVKNPARTVLEIFNDSIRVVDITKLDWSNNWESKISADVRKFESNIVLLERQSKKSPYSKFVYFIKGLLY

SEQ ID NO: 41779 - protein, 84 aa, unidentified
  REGION 1..84: note = Description of Unknown:cds_NC_030656.1_cds_YP_009268832.1_117 target sequence
SKFVYFIKGLLYNTNTKVYCVPPVMKGSTYKSRKRRSIKIFLKWLTFFDLGDYVPVRRKMDDVADSFNIAMRYVIEKYIKMKFN

SEQ ID NO: 41780 - protein, 85 aa, unidentified
  REGION 1..85: note = Description of Unknown:cds_NC_030656.1_cds_YP_009268832.1_117 target sequence
FNDSIRVVDITKLDWSNNWESKISADVRKFESNIVLLERQSKKSPYSKFVYFIKGLLYNTNTKVYCVPPVMKGSTYKSRKRRSIK

SEQ ID NO: 41781 - protein, 85 aa, unidentified
  REGION 1..85: note = Description of Unknown:hvTR_P06930 target sequence
AEGAEHQQKLTEKDKAELPLSIRDLAEALGIPVIDCLIPCNFCGNFLNYLEACEFDYKRLSLIWKDYCVFACCRVCCGATATYEF

SEQ ID NO: 41782 - protein, 84 aa, unidentified
  REGION 1..84: note = Description of Unknown:hvTR_P06930 target sequence
CRVCCGATATYEFNQFYEQTVLGRDIELASGLSIFDIDIRCQTCLAFLDIIEKLDCCGRGLPFHKVRNAWKGICRQCKHFYHDW

SEQ ID NO: 41783 - protein, 85 aa, unidentified
  REGION 1..85: note = Description of Unknown:hvTR_P06930 target sequence
ALGIPVIDCLIPCNFCGNFLNYLEACEFDYKRLSLIWKDYCVFACCRVCCGATATYEFNQFYEQTVLGRDIELASGLSIFDIDIR

SEQ ID NO: 41784 - protein, 85 aa, unidentified
  REGION 1..85: note = Description of Unknown:cds_NZ_WFIY01000004.1_cds_WP_013774886.1_1577 target sequence
DNEIKKWIQELGLMINVPPQAKEPFHVVMYPPQGGGPTLEVVRPPNQNLYIVIMGVGIHEIHQNALKEMKEDERRKFLNELKYDL

SEQ ID NO: 41785 - protein, 84 aa, unidentified
  REGION 1..84: note = Description of Unknown:cds_NZ_WFIY01000004.1_cds_WP_013774886.1_1577 target sequence
ERRKFLNELKYDLLKMGVDIIFMPVGQEIPSAIQVSRVLLPDNLTANEFVNAVYIVRNAGLYIIFKFSDTFGTPQGKGGNIRYI

SEQ ID NO: 41786 - protein, 85 aa, unidentified
  REGION 1..85: note = Description of Unknown:cds_NZ_WFIY01000004.1_cds_WP_013774886.1_1577 target sequence
VMYPPQGGGPTLEVVRPPNQNLYIVIMGVGIHEIHQNALKEMKEDERRKFLNELKYDLLKMGVDIIFMPVGQEIPSAIQVSRVLL

SEQ ID NO: 41787 - protein, 85 aa, unidentified
  REGION 1..85: note = Description of Unknown:cds_NZ_WFIY01000004.1_cds_WP_155863870.1_1774 target sequence
TCDAAVVLLLNCENKFLLIKRSTNPKDPWSGNMALPGGHREGNEDCETTAKRECKEETGIEPEIIAFLGYYSPHNANITVAAFLG

SEQ ID NO: 41788 - protein, 84 aa, unidentified
  REGION 1..84: note = Description of Unknown:cds_NZ_WFIY01000004.1_cds_WP_155863870.1_1774 target sequence
PHNANITVAAFLGRTCFSKIKRDKKEVAKYFWVSFSDLKKGEECFYYKKYRIWGMTYRIIRDYMEKFSPATDTSSFRSVDHSSL

SEQ ID NO: 41789 - protein, 85 aa, unidentified
  REGION 1..85: note = Description of Unknown:cds_NZ_WFIY01000004.1_cds_WP_155863870.1_1774 target sequence
PWSGNMALPGGHREGNEDCETTAKRECKEETGIEPEIIAFLGYYSPHNANITVAAFLGRTCFSKIKRDKKEVAKYFWVSFSDLKK

SEQ ID NO: 41790 - protein, 85 aa, unidentified
  REGION 1..85: note = Description of Unknown:cds_NZ_WFIY01000004.1_cds_WP_155863982.1_1906 target sequence
YWVRKGIIGGSCLPYTVDEIKKWKASGVKKVVVLPEEWEIEEAWGSADYYFSVLEENGLKFIHVPIPDGYPPTLSQFEEIMDWLE

SEQ ID NO: 41791 - protein, 84 aa, unidentified
  REGION 1..84: note = Description of Unknown:cds_NZ_WFIY01000004.1_cds_WP_155863982.1_1906 target sequence
TLSQFEEIMDWLEGRGNLVHCVGGIGRTGTVLAGYLMVTEGLSANEAVEEVRKYRSGAVQTLQQFEFLLSLEGKNNVGKRRLST

SEQ ID NO: 41792 - protein, 85 aa, unidentified
  REGION 1..85: note = Description of Unknown:cds_NZ_WFIY01000004.1_cds_WP_155863982.1_1906 target sequence
VKKVVVLPEEWEIEEAWGSADYYFSVLEENGLKFIHVPIPDGYPPTLSQFEEIMDWLEGRGNLVHCVGGIGRTGTVLAGYLMVTE

SEQ ID NO: 41793 - protein, 85 aa, unidentified
  REGION 1..85: note = Description of Unknown:cds_NZ_WFIY01000004.1_cds_WP_155864183.1_2142 target sequence
KTYLLLALVATASLASGMAIAGVMGYGPLAYISYHIQTSSQGEVIPAYINLGNLTAGESGNVTANATVVINYNGTYELHLLHGEK

SEQ ID NO: 41794 - protein, 84 aa, unidentified
  REGION 1..84: note = Description of Unknown:cds_NZ_WFIY01000004.1_cds_WP_155864183.1_2142 target sequence
NGTYELHLLHGEKLQKVFSEFTVKVTIGNTSVVLTPDNDTASLYLAKGTYTVLIEVMYQVSQNPKGDLNVNQEPLLIIHPEGED

SEQ ID NO: 41795 - protein, 85 aa, unidentified
  REGION 1..85: note = Description of Unknown:cds_NZ_WFIY01000004.1_cds_WP_155864183.1_2142 target sequence
PLAYISYHIQTSSQGEVIPAYINLGNLTAGESGNVTANATVVINYNGTYELHLLHGEKLQKVFSEFTVKVTIGNTSVVLTPDNDT

SEQ ID NO: 41796 - protein, 85 aa, unidentified
  REGION 1..85: note = Description of Unknown:cds_NC_005830.1_cds_YP_003730.1_5 target sequence
SEMSVVEYEVVSKNLTSKMSHELLFSVKKRWFVKPFRHDRQLGKLHYKLLPGNYIKFGLYVLKNQDYARFEIAWVHVDKDGKIEE

SEQ ID NO: 41797 - protein, 84 aa, unidentified
  REGION 1..84: note = Description of Unknown:cds_NC_005830.1_cds_YP_003730.1_5 target sequence
AWVHVDKDGKIEERTVYSIETYWHIFIDIENDLNCPYVLAKFIEMRPEFHKTAWVEESNYSIAEDDIQMVESIKRYLERKIASD

SEQ ID NO: 41798 - protein, 85 aa, unidentified
  REGION 1..85: note = Description of Unknown:cds_NC_005830.1_cds_YP_003730.1_5 target sequence
KKRWFVKPFRHDRQLGKLHYKLLPGNYIKFGLYVLKNQDYARFEIAWVHVDKDGKIEERTVYSIETYWHIFIDIENDLNCPYVLA

SEQ ID NO: 41799 - protein, 85 aa, unidentified
  REGION 1..85: note = Description of Unknown:cds_NC_010495.1_cds_YP_001742050.1_13 target sequence
RVIMMHPGATRAYIEKHCGGKRSSTTTHRLHEMLALGFIRREKSVIRGGKWQYKYFISDDAAGIDDAIKCHLLDNASSEVKEISA

SEQ ID NO: 41800 - protein, 84 aa, unidentified
  REGION 1..84: note = Description of Unknown:cds_NC_010495.1_cds_YP_001742050.1_13 target sequence
LDNASSEVKEISATTGIDYRIVKSRIRIMFHNGDVTRSYDHHKKLWRYSWRDQEVNVNNLFNSLLRNVRGHYGEGEAQEAGGRL

SEQ ID NO: 41801 - protein, 85 aa, unidentified
  REGION 1..85: note = Description of Unknown:cds_NC_010495.1_cds_YP_001742050.1_13 target sequence
HRLHEMLALGFIRREKSVIRGGKWQYKYFISDDAAGIDDAIKCHLLDNASSEVKEISATTGIDYRIVKSRIRIMFHNGDVTRSYD

SEQ ID NO: 41802 - protein, 85 aa, unidentified
  REGION 1..85: note = Description of Unknown:cds_NC_010495.1_cds_YP_001742053.1_16 target sequence
ATIRYGTIIGGPARKNDPQIREGIMKVALKPGALVDFDTTDDKIIAHATAGGQGFPYVLQHNYIGGGDVSEDVPAGATGMAVQCE

SEQ ID NO: 41803 - protein, 84 aa, unidentified
  REGION 1..84: note = Description of Unknown:cds_NC_010495.1_cds_YP_001742053.1_16 target sequence
VPAGATGMAVQCEFGVTYHALVAASSTLKKGTPLASDGNGALKVAGNEDNILFYSDETYTVPAGGAELVAVRRAGNASMPTGEQ

SEQ ID NO: 41804 - protein, 85 aa, unidentified
  REGION 1..85: note = Description of Unknown:cds_NC_010495.1_cds_YP_001742053.1_16 target sequence
ALKPGALVDFDTTDDKIIAHATAGGQGFPYVLQHNYIGGGDVSEDVPAGATGMAVQCEFGVTYHALVAASSTLKKGTPLASDGNG

SEQ ID NO: 41805 - protein, 85 aa, unidentified
  REGION 1..85: note = Description of Unknown:hvTR_P27555 target sequence
ASTSGVGSVGPASCCETQKPHTIRELCLAQQITYPCIQLCCHYCYKILSVLDIYAFDQSCLYLSWGEGGPTGICSQCTRVLARLE

SEQ ID NO: 41806 - protein, 84 aa, unidentified
  REGION 1..84: note = Description of Unknown:hvTR_P27555 target sequence
GICSQCTRVLARLEFTARHEVSCAASRLPHFIGQSLSDLEVRCVRCLALLQSVEKDYILREDLSVHRIGGIWRGTCVRCMVGLY

SEQ ID NO: 41807 - protein, 85 aa, unidentified
  REGION 1..85: note = Description of Unknown:hvTR_P27555 target sequence
LAQQITYPCIQLCCHYCYKILSVLDIYAFDQSCLYLSWGEGGPTGICSQCTRVLARLEFTARHEVSCAASRLPHFIGQSLSDLEV

SEQ ID NO: 41808 - protein, 85 aa, unidentified
  REGION 1..85: note = Description of Unknown:vpeps_3II2_1 target sequence
GSEMSVVEYEVVSKNLTSKMSHELLFSVKKRWFVKPFRHDRQLGKLHYKLLPGNYIKFGLYVLKNQDYARFEIAWVHVDKDGKIE

SEQ ID NO: 41809 - protein, 85 aa, unidentified
  REGION 1..85: note = Description of Unknown:vpeps_3II2_1 target sequence
IAWVHVDKDGKIEERTVYSIETYWHIFIDIENDLNCPYVLAKFIEMRPEFHKTAWVEESNYSIAEDDIQMVESIKRYLERKIASD

SEQ ID NO: 41810 - protein, 85 aa, unidentified
  REGION 1..85: note = Description of Unknown:vpeps_3II2_1 target sequence
VKKRWFVKPFRHDRQLGKLHYKLLPGNYIKFGLYVLKNQDYARFEIAWVHVDKDGKIEERTVYSIETYWHIFIDIENDLNCPYVL

SEQ ID NO: 41811 - protein, 85 aa, unidentified
  REGION 1..85: note = Description of Unknown:vpeps_3ILD_1 target sequence
GSEMSVVEYEVVSKNLTSKMSHELLFSVKKRWFVKPFRHDRQLGKLHYKLLPGNYIAFGLYVLKNQDYARFEIAWVHVDKDGKIE

SEQ ID NO: 41812 - protein, 85 aa, unidentified
  REGION 1..85: note = Description of Unknown:vpeps_3ILD_1 target sequence
VKKRWFVKPFRHDRQLGKLHYKLLPGNYIAFGLYVLKNQDYARFEIAWVHVDKDGKIEERTVYSIETYWHIFIDIENDLNCPYVL

SEQ ID NO: 41813 - protein, 85 aa, unidentified
  REGION 1..85: note = Description of Unknown:vpeps_3ILE_1 target sequence
IAWVHVDKDGKIEARTVYSIETYWHIFIDIENDLNCPYVLAKFIEMRPEFHKTAWVEESNYSIAEDDIQMVESIKRYLERKIASD

SEQ ID NO: 41814 - protein, 85 aa, unidentified
  REGION 1..85: note = Description of Unknown:vpeps_3ILE_1 target sequence
VKKRWFVKPFRHDRQLGKLHYKLLPGNYIKFGLYVLKNQDYARFEIAWVHVDKDGKIEARTVYSIETYWHIFIDIENDLNCPYVL

SEQ ID NO: 41815 - protein, 85 aa, unidentified
  REGION 1..85: note = Description of Unknown:vpeps_3B6B_1 target sequence
SYYHHHHHHLESTSLYKKAGLQRTLVLIKPDAFERSLVAEIMGRIEKKNFKIVSMKFWSKAPRNLIEQHYKEHSEQSYFNDNCDF

SEQ ID NO: 41816 - protein, 85 aa, unidentified
  REGION 1..85: note = Description of Unknown:vpeps_3B6B_1 target sequence
HSEQSYFNDNCDFMVSGPIISIVYEGTDAISKIRRLQGNILTPGTIRGDLANDIRENLIHASDSEDSAVDEISIWFPETKMETDN

SEQ ID NO: 41817 - protein, 85 aa, unidentified
  REGION 1..85: note = Description of Unknown:vpeps_3B6B_1 target sequence
IKPDAFERSLVAEIMGRIEKKNFKIVSMKFWSKAPRNLIEQHYKEHSEQSYFNDNCDFMVSGPIISIVYEGTDAISKIRRLQGNI

SEQ ID NO: 41818 - protein, 85 aa, unidentified
  REGION 1..85: note = Description of Unknown:cds_NC_024711.1_cds_YP_009052494.1_13 target sequence
VSFKFSFGVVGKSKEKGIVNKYVIIVAKCEGIIRYINGTYKVEYNDKLYSITGESYRTKGKKVVYARRLDEYNHRIKIIRDSENR

SEQ ID NO: 41819 - protein, 84 aa, unidentified
  REGION 1..84: note = Description of Unknown:cds_NC_024711.1_cds_YP_009052494.1_13 target sequence
YNHRIKIIRDSENRKTVDTRFYIPFAAGLIAKGKIVKMPFAKELFHITTCYNRGDSESTILAFQEWKEYEDKVKNNLIDVNNEL

SEQ ID NO: 41820 - protein, 85 aa, unidentified
  REGION 1..85: note = Description of Unknown:cds_NC_024711.1_cds_YP_009052494.1_13 target sequence
KCEGIIRYINGTYKVEYNDKLYSITGESYRTKGKKVVYARRLDEYNHRIKIIRDSENRKTVDTRFYIPFAAGLIAKGKIVKMPFA

SEQ ID NO: 41821 - protein, 85 aa, unidentified
  REGION 1..85: note = Description of Unknown:cds_NZ_WFIY01000004.1_cds_WP_155862413.1_153 target sequence
IIKVHGIKGGSGKSTISKYLFYYFRKKERKKVSLYSIEEIVKYNNPEIIILDNVNLTIKNSNIEWKLFVTDPQSLELSLNYIKDD

SEQ ID NO: 41822 - protein, 84 aa, unidentified
  REGION 1..84: note = Description of Unknown:cds_NZ_WFIY01000004.1_cds_WP_155862413.1_153 target sequence
PQSLELSLNYIKDDDFLIVNKVSPFPCEQAEIIKKVYKLRAVLVPFNGKLFYEEYEELVEPTLNRLAENLLGLRKDHLIVPFQQ

SEQ ID NO: 41823 - protein, 85 aa, unidentified
  REGION 1..85: note = Description of Unknown:cds_NZ_WFIY01000004.1_cds_WP_155862413.1_153 target sequence
ERKKVSLYSIEEIVKYNNPEIIILDNVNLTIKNSNIEWKLFVTDPQSLELSLNYIKDDDFLIVNKVSPFPCEQAEIIKKVYKLRA

SEQ ID NO: 41824 - protein, 85 aa, unidentified
  REGION 1..85: note = Description of Unknown:cds_NZ_WFIY01000004.1_cds_WP_013775937.1_461 target sequence
SDSVKKKVDMDTIDRRLLIELLRDARSSLRRLSEEMNVSPATLHNRLTRLVQEGIIKGFTALIDYSKLGYTLSAVIMAKVDGKHL

SEQ ID NO: 41825 - protein, 84 aa, unidentified
  REGION 1..84: note = Description of Unknown:cds_NZ_WFIY01000004.1_cds_WP_013775937.1_461 target sequence
LSAVIMAKVDGKHLVEFEREVANADNVVAVYDVVGEYDVVLIAKFRSVEDLDAFLKQLLKNPKVERTYTSIVLNVVKEDPRVKI

SEQ ID NO: 41826 - protein, 85 aa, unidentified
  REGION 1..85: note = Description of Unknown:cds_NZ_WFIY01000004.1_cds_WP_013775937.1_461 target sequence
SLRRLSEEMNVSPATLHNRLTRLVQEGIIKGFTALIDYSKLGYTLSAVIMAKVDGKHLVEFEREVANADNVVAVYDVVGEYDVVL

SEQ ID NO: 41827 - protein, 85 aa, unidentified
  REGION 1..85: note = Description of Unknown:cds_NZ_WFIY01000004.1_cds_739 target sequence
IPKAVAIVRIRGYAHAPWKIQETLEMLRLPKVFNTMIYPYTESLKGMLIKVEPFITWGEISEDGLNALLNRLETCKGEKITEEYI

SEQ ID NO: 41828 - protein, 84 aa, unidentified
  REGION 1..84: note = Description of Unknown:cds_NZ_WFIY01000004.1_cds_739 target sequence
ETCKGEKITEEYIKTKLSMDLNTFKTKLLSGELALNKLDNIFKLPIRLHPPSGGFKGKINAPYKSKGEFGYRGLEINNLIKRMV

SEQ ID NO: 41829 - protein, 85 aa, unidentified
  REGION 1..85: note = Description of Unknown:cds_NZ_WFIY01000004.1_cds_739 target sequence
RLPKVFNTMIYPYTESLKGMLIKVEPFITWGEISEDGLNALLNRLETCKGEKITEEYIKTKLSMDLNTFKTKLLSGELALNKLDN

SEQ ID NO: 41830 - protein, 85 aa, unidentified
  REGION 1..85: note = Description of Unknown:cds_NZ_WFIY01000004.1_cds_WP_155862905.1_755 target sequence
ASWTYPQLSIDETKLGKAVVKDAPVSIRDLYNVCKAIRGMKVKEARDFLDRVLKRQEALPFWRYSHGSSHRSNISSKWGIKNGRY

SEQ ID NO: 41831 - protein, 84 aa, unidentified
  REGION 1..84: note = Description of Unknown:cds_NZ_WFIY01000004.1_cds_WP_155862905.1_755 target sequence
SNISSKWGIKNGRYPVKAIKYVLKALDNAEANAVAKGLDPDNLKIIHIAAHKSFTLKRFMPRAFGRATAKYRRTSHIEVIVGEL

SEQ ID NO: 41832 - protein, 85 aa, unidentified
  REGION 1..85: note = Description of Unknown:cds_NZ_WFIY01000004.1_cds_WP_155862905.1_755 target sequence
RDLYNVCKAIRGMKVKEARDFLDRVLKRQEALPFWRYSHGSSHRSNISSKWGIKNGRYPVKAIKYVLKALDNAEANAVAKGLDPD

SEQ ID NO: 41833 - protein, 85 aa, unidentified
  REGION 1..85: note = Description of Unknown:cds_NZ_WFIY01000004.1_cds_WP_155863805.1_1690 target sequence
SKLAVDTLEIYGHPNVLGKHKSTLEFTKENYLTSRGDCIIGINSTKAIADLKEEVKEILKENGYGYVIIKIDNLIDIVSGRGDKR

SEQ ID NO: 41834 - protein, 84 aa, unidentified
  REGION 1..84: note = Description of Unknown:cds_NZ_WFIY01000004.1_cds_WP_155863805.1_1690 target sequence
DNLIDIVSGRGDKRMTFSNKVKIIIRKSNFISDSTLLVYSDKAAADIKRDIINRLRQGDKAKVFIIASDIPLKNEEILRVIVNS

SEQ ID NO: 41835 - protein, 85 aa, unidentified
  REGION 1..85: note = Description of Unknown:cds_NZ_WFIY01000004.1_cds_WP_155863805.1_1690 target sequence
KENYLTSRGDCIIGINSTKAIADLKEEVKEILKENGYGYVIIKIDNLIDIVSGRGDKRMTFSNKVKIIIRKSNFISDSTLLVYSD

SEQ ID NO: 41836 - protein, 85 aa, unidentified
  REGION 1..85: note = Description of Unknown:cds_NZ_WFIY01000004.1_cds_WP_155864166.1_2121 target sequence
RLWSIHPKYLDTRGLLGLWREGLLAQKVLLGETRGYKNHPQLIRFKRTSDPVLYLGTYLYYVYMEGVRRGYSFNKDKIVKYDLTL

SEQ ID NO: 41837 - protein, 84 aa, unidentified
  REGION 1..84: note = Description of Unknown:cds_NZ_WFIY01000004.1_cds_WP_155864166.1_2121 target sequence
SFNKDKIVKYDLTLRMPVTEGQINYEFHHLLEKLKIRNPKMYAELLQVKIIETNPIFFVVKGGIEEWEKIAFFNSNTTIPYEKV

SEQ ID NO: 41838 - protein, 85 aa, unidentified
  REGION 1..85: note = Description of Unknown:cds_NZ_WFIY01000004.1_cds_WP_155864166.1_2121 target sequence
VLLGETRGYKNHPQLIRFKRTSDPVLYLGTYLYYVYMEGVRRGYSFNKDKIVKYDLTLRMPVTEGQINYEFHHLLEKLKIRNPKM

SEQ ID NO: 41839 - protein, 85 aa, unidentified
  REGION 1..85: note = Description of Unknown:cds_NC_003214.2_cds_NP_445707.1_42 target sequence
VAKVFYMCPIDYKDILTLDLETRSVGIRKCDHVFGYIIPPSHSVREDEICPKQYRIRSWHIGKAIYGVCISFENGVKYVVRDIKK

SEQ ID NO: 41840 - protein, 84 aa, unidentified
  REGION 1..84: note = Description of Unknown:cds_NC_003214.2_cds_NP_445707.1_42 target sequence
FENGVKYVVRDIKKLKEILEELLNYPKDQIIYFILGEFEREKIIDMIKDMIKDMFVGYKANNEFCTPKTITIIGVLNKVTIYFL

SEQ ID NO: 41841 - protein, 85 aa, unidentified
  REGION 1..85: note = Description of Unknown:cds_NC_003214.2_cds_NP_445707.1_42 target sequence
RKCDHVFGYIIPPSHSVREDEICPKQYRIRSWHIGKAIYGVCISFENGVKYVVRDIKKLKEILEELLNYPKDQIIYFILGEFERE

SEQ ID NO: 41842 - protein, 85 aa, unidentified
  REGION 1..85: note = Description of Unknown:cds_NC_030656.1_cds_YP_009268785.1_70 target sequence
DHAQYVLAMFLTDNNSFYSYMADQSDQDALEIVSEITEYLNYLLKLLLQSKQKLEAIGYCYEHLAENFKSVVCFEDMRILKRLVD

SEQ ID NO: 41843 - protein, 84 aa, unidentified
  REGION 1..84: note = Description of Unknown:cds_NC_030656.1_cds_YP_009268785.1_70 target sequence
VCFEDMRILKRLVDKTPTSKIDQIKLNKDHLADFVVALHRLKKNMPLDIPLSVTQVNMSQNTFLNNILDILTESENKDNKTKIK

SEQ ID NO: 41844 - protein, 85 aa, unidentified
  REGION 1..85: note = Description of Unknown:cds_NC_030656.1_cds_YP_009268785.1_70 target sequence
DALEIVSEITEYLNYLLKLLLQSKQKLEAIGYCYEHLAENFKSVVCFEDMRILKRLVDKTPTSKIDQIKLNKDHLADFVVALHRL

SEQ ID NO: 41845 - protein, 85 aa, unidentified
  REGION 1..85: note = Description of Unknown:cds_NC_010495.1_cds_YP_001742072.1_35 target sequence
IVKYPDWLPLTQRASKNLTQQTPFRSDQPAVGAPIFQKLTTDIAATWSLTWVFTLAEERAFIQWLRSPGYLNKCNNWFTMMIDLG

SEQ ID NO: 41846 - protein, 84 aa, unidentified
  REGION 1..84: note = Description of Unknown:cds_NC_010495.1_cds_YP_001742072.1_35 target sequence
NKCNNWFTMMIDLGGSGLQEQTLHFTDYPVQTSIDGGVVTWTGNVIAKKLNNTMDEFDDVLVELDCKWFGWLDEVVNRDLPEYQ

SEQ ID NO: 41847 - protein, 85 aa, unidentified
  REGION 1..85: note = Description of Unknown:cds_NC_010495.1_cds_YP_001742072.1_35 target sequence
QPAVGAPIFQKLTTDIAATWSLTWVFTLAEERAFIQWLRSPGYLNKCNNWFTMMIDLGGSGLQEQTLHFTDYPVQTSIDGGVVTW

SEQ ID NO: 41848 - protein, 85 aa, unidentified
  REGION 1..85: note = Description of Unknown:cds_NC_010495.1_cds_YP_001742073.1_36 target sequence
PSLRDYKAKRPNWALFDTITFYHSSFGHVRLVANVLDEMVLGGETYLPVRMDITQSQQSNTPVINATVKFARLANDFKQYLKLWT

SEQ ID NO: 41849 - protein, 84 aa, unidentified
  REGION 1..84: note = Description of Unknown:cds_NC_010495.1_cds_YP_001742073.1_36 target sequence
RLANDFKQYLKLWTGSGRIEPITALYQRFEETDTNTPLKPYRLYVSDVAMDGSDVTVTLSIKNPIKGNVAKLYDITQFPGLRNV

SEQ ID NO: 41850 - protein, 85 aa, unidentified
  REGION 1..85: note = Description of Unknown:cds_NC_010495.1_cds_YP_001742073.1_36 target sequence
HVRLVANVLDEMVLGGETYLPVRMDITQSQQSNTPVINATVKFARLANDFKQYLKLWTGSGRIEPITALYQRFEETDTNTPLKPY

SEQ ID NO: 41851 - protein, 85 aa, unidentified
  REGION 1..85: note = Description of Unknown:cds_NZ_WFIY01000004.1_cds_WP_155862672.1_468 target sequence
KNGLIVSKIKNGTVIDHIPAGRALAVLNILGIKGNEGNRVALVMNVESSKIGKKDIVKIEERELNQREVELIALIAPSATINIIR

SEQ ID NO: 41852 - protein, 84 aa, unidentified
  REGION 1..84: note = Description of Unknown:cds_NZ_WFIY01000004.1_cds_WP_155862672.1_468 target sequence
LIALIAPSATINIIRNYEVVEKRKLNLPEKIEGILKCPNPACITNNDVEARSRFIVISKSPLVLKCDYCETTLTEDEVLRQILL

SEQ ID NO: 41853 - protein, 85 aa, unidentified
  REGION 1..85: note = Description of Unknown:cds_NZ_WFIY01000004.1_cds_WP_155862672.1_468 target sequence
NILGIKGNEGNRVALVMNVESSKIGKKDIVKIEERELNQREVELIALIAPSATINIIRNYEVVEKRKLNLPEKIEGILKCPNPAC

SEQ ID NO: 41854 - protein, 85 aa, unidentified
  REGION 1..85: note = Description of Unknown:cds_NZ_WFIY01000004.1_cds_WP_155862863.1_701 target sequence
IDSRIEVKFLSTDEEIINYCKDAKVTSIDSPLSLSKGFREVDKTMIRNGYRVLPPSFMVSLVTRAIKLSSLLPNVIETHPTSSMK

SEQ ID NO: 41855 - protein, 84 aa, unidentified
  REGION 1..84: note = Description of Unknown:cds_NZ_WFIY01000004.1_cds_WP_155862863.1_701 target sequence
LLPNVIETHPTSSMKNLGINWKDYSRKKDEIDAVICAITAYAYDNHLALEISANDGTVYLLPKGFPKPIKMSEGYYTLPHIGNQ

SEQ ID NO: 41856 - protein, 85 aa, unidentified
  REGION 1..85: note = Description of Unknown:cds_NZ_WFIY01000004.1_cds_WP_155862863.1_701 target sequence
IDSPLSLSKGFREVDKTMIRNGYRVLPPSFMVSLVTRAIKLSSLLPNVIETHPTSSMKNLGINWKDYSRKKDEIDAVICAITAYA

SEQ ID NO: 41857 - protein, 85 aa, unidentified
  REGION 1..85: note = Description of Unknown:cds_NZ_WFIY01000004.1_cds_WP_155863403.1_1380 target sequence
DLRPIGVVIGPSEDEVNRNMWKGGVKGIIKVYEEFKEGLLGIENFSHIIVISWLHKITEDQRKILIVKPLRMTDLGYKLSELPTL

SEQ ID NO: 41858 - protein, 84 aa, unidentified
  REGION 1..84: note = Description of Unknown:cds_NZ_WFIY01000004.1_cds_WP_155863403.1_1380 target sequence
RMTDLGYKLSELPTLGVFASHSPVRPNPIGITIVKLTKRQDNLLFVEGLDLYDGTPILDLKGYYPYQSKDVRVPEWSKKLRSKV

SEQ ID NO: 41859 - protein, 85 aa, unidentified
  REGION 1..85: note = Description of Unknown:cds_NZ_WFIY01000004.1_cds_WP_155863403.1_1380 target sequence
IIKVYEEFKEGLLGIENFSHIIVISWLHKITEDQRKILIVKPLRMTDLGYKLSELPTLGVFASHSPVRPNPIGITIVKLTKRQDN

SEQ ID NO: 41860 - protein, 85 aa, unidentified
  REGION 1..85: note = Description of Unknown:cds_NZ_WFIY01000004.1_cds_WP_155864063.1_2000 target sequence
LETLELTLIGVLSFLGMEFLARLLHKYVMHGALWFLHEDHHREKQAELEKNDAFGIIFAGIAILLFVEWLRTGNPLPFAVALGMT

SEQ ID NO: 41861 - protein, 84 aa, unidentified
  REGION 1..84: note = Description of Unknown:cds_NZ_WFIY01000004.1_cds_WP_155864063.1_2000 target sequence
RTGNPLPFAVALGMTAYGAAYVFVHDMIIHDRHLHLRSWGLKHQPFRELILVHDVHHREGRGNWGFLLVIRGIDKIPEEARQKA

SEQ ID NO: 41862 - protein, 85 aa, unidentified
  REGION 1..85: note = Description of Unknown:cds_NZ_WFIY01000004.1_cds_WP_155864063.1_2000 target sequence
VMHGALWFLHEDHHREKQAELEKNDAFGIIFAGIAILLFVEWLRTGNPLPFAVALGMTAYGAAYVFVHDMIIHDRHLHLRSWGLK

SEQ ID NO: 41863 - protein, 85 aa, unidentified
  REGION 1..85: note = Description of Unknown:cds_NZ_WFIY01000004.1_cds_WP_155864152.1_2106 target sequence
KGLSNVIMLVIILIIILSVFIPLGIEFMYFPQNNQEILFSKESYNYYHCLICQDIASGFLKISYSTQKVDGVYKVILTFCLAKGV

SEQ ID NO: 41864 - protein, 84 aa, unidentified
  REGION 1..84: note = Description of Unknown:cds_NZ_WFIY01000004.1_cds_WP_155864152.1_2106 target sequence
GVYKVILTFCLAKGVGGIPICKINITEIFYYNQGHWCVVKLSYPIIISISYSPHSIIFYLNELSDLAIVTNYGNLIFIVPCSST

SEQ ID NO: 41865 - protein, 85 aa, unidentified
  REGION 1..85: note = Description of Unknown:cds_NZ_WFIY01000004.1_cds_WP_155864152.1_2106 target sequence
MYFPQNNQEILFSKESYNYYHCLICQDIASGFLKISYSTQKVDGVYKVILTFCLAKGVGGIPICKINITEIFYYNQGHWCVVKLS

SEQ ID NO: 41866 - protein, 85 aa, unidentified
  REGION 1..85: note = Description of Unknown:cds_NC_035460.1_cds_YP_009408105.1_154 target sequence
GTITMYNLLEHKIRHLINIYYKVPDINYILKSLKTQILPEPVINNKFFNYVFKTINSSTDFLKFLIVLLIKNNYLYKVKKILYII

SEQ ID NO: 41867 - protein, 84 aa, unidentified
  REGION 1..84: note = Description of Unknown:cds_NC_035460.1_cds_YP_009408105.1_154 target sequence
KNNYLYKVKKILYIILVQCTPINNCIYLNKNMFNDNFLAGIMYNIFENLSIEFDTKSYKIVINNKRQIFDLYMIIVFLYYYYTV

SEQ ID NO: 41868 - protein, 85 aa, unidentified
  REGION 1..85: note = Description of Unknown:cds_NC_035460.1_cds_YP_009408105.1_154 target sequence
YILKSLKTQILPEPVINNKFFNYVFKTINSSTDFLKFLIVLLIKNNYLYKVKKILYIILVQCTPINNCIYLNKNMFNDNFLAGIM

SEQ ID NO: 41869 - protein, 85 aa, unidentified
  REGION 1..85: note = Description of Unknown:cds_NC_029316.1_cds_YP_009230302.1_49 target sequence
PGSTPGSNKKHASDDSDKIVPILKKLFLKNEMVMNASGVEVLNKIFEKIETKEGRNYIKYVLLSLFLPSNLRLVPGTGEVKDIIF

SEQ ID NO: 41870 - protein, 84 aa, unidentified
  REGION 1..84: note = Description of Unknown:cds_NC_029316.1_cds_YP_009230302.1_49 target sequence
LRLVPGTGEVKDIIFIGSEDKNTKKCGTFKILAVDNGKNYEYCLEVCGSLSITINLIPCTEVRNTVKQTDRVNMSELEFSKLDL

SEQ ID NO: 41871 - protein, 85 aa, unidentified
  REGION 1..85: note = Description of Unknown:cds_NC_029316.1_cds_YP_009230302.1_49 target sequence
LKNEMVMNASGVEVLNKIFEKIETKEGRNYIKYVLLSLFLPSNLRLVPGTGEVKDIIFIGSEDKNTKKCGTFKILAVDNGKNYEY

SEQ ID NO: 41872 - protein, 85 aa, unidentified
  REGION 1..85: note = Description of Unknown:cds_NC_007409.1_cds_YP_319862.1_31 target sequence
PGQTQKTPAFTTDQFLDLINRLFGLDLAIVSERNIPLIINRLDDINLKLLLAKMMVNGMDEFIPFRHSPEGIRSINVEQIPPASG

SEQ ID NO: 41873 - protein, 84 aa, unidentified
  REGION 1..84: note = Description of Unknown:cds_NC_007409.1_cds_YP_319862.1_31 target sequence
GIRSINVEQIPPASGDPVDTPDYRLSIEYKNGEQDNFICTYDETKWKCTARDVDEITSIIGKRSQANSKNDSNSKDDLPNPFSV

SEQ ID NO: 41874 - protein, 85 aa, unidentified
  REGION 1..85: note = Description of Unknown:cds_NC_007409.1_cds_YP_319862.1_31 target sequence
AIVSERNIPLIINRLDDINLKLLLAKMMVNGMDEFIPFRHSPEGIRSINVEQIPPASGDPVDTPDYRLSIEYKNGEQDNFICTYD

SEQ ID NO: 41875 - protein, 85 aa, unidentified
  REGION 1..85: note = Description of Unknown:hvTR_P59633 target sequence
MPTTLFAGTHITMTTVYHITVSQIQLSLLKVTAFQHQNSKKTTKLVVILRIGTQVLKTMSLYMAISPKFTTSLSLHKLLQTLVLK

SEQ ID NO: 41876 - protein, 84 aa, unidentified
  REGION 1..84: note = Description of Unknown:hvTR_P59633 target sequence
TTSLSLHKLLQTLVLKMLHSSSLTSLLKTHRMCKYTQSTALQELLIQQWIQFMMSRRRLLACLCKHKKVSTNLCTHSFRKKQVR

SEQ ID NO: 41877 - protein, 85 aa, unidentified
  REGION 1..85: note = Description of Unknown:hvTR_P59633 target sequence
LLKVTAFQHQNSKKTTKLVVILRIGTQVLKTMSLYMAISPKFTTSLSLHKLLQTLVLKMLHSSSLTSLLKTHRMCKYTQSTALQE

SEQ ID NO: 41878 - protein, 85 aa, unidentified
  REGION 1..85: note = Description of Unknown:cds_NZ_WFIY01000004.1_cds_WP_155864386.1_798 target sequence
CGMPIRGKGFTVVYEGSVITVCEACYSKIKKSAKIYEERPKKTQIIKQQSQNINNKKPEIEVEVVDDYYKVIKSARERLGLTTKQ

SEQ ID NO: 41879 - protein, 84 aa, unidentified
  REGION 1..84: note = Description of Unknown:cds_NZ_WFIY01000004.1_cds_WP_155864386.1_798 target sequence
KVIKSARERLGLTTKQLAEKMRVSENIIKRFEQGKLKPTIEQAKELEKILSVKLLYTVPNEETQRVEKNFELTLGDIVNIREKK

SEQ ID NO: 41880 - protein, 85 aa, unidentified
  REGION 1..85: note = Description of Unknown:cds_NZ_WFIY01000004.1_cds_WP_155864386.1_798 target sequence
KIKKSAKIYEERPKKTQIIKQQSQNINNKKPEIEVEVVDDYYKVIKSARERLGLTTKQLAEKMRVSENIIKRFEQGKLKPTIEQA

SEQ ID NO: 41881 - protein, 85 aa, unidentified
  REGION 1..85: note = Description of Unknown:cds_NZ_WFIY01000004.1_cds_WP_155863506.1_1457 target sequence
IDKEVFRLINFRLIKLLLYVAKRENADVDATKLQKIFFLLEKEKGVELGLNFEPWFFGPYSELLQDYIDKLIELGEVDVIEHEVK

SEQ ID NO: 41882 - protein, 84 aa, unidentified
  REGION 1..84: note = Description of Unknown:cds_NZ_WFIY01000004.1_cds_WP_155863506.1_1457 target sequence
KLIELGEVDVIEHEVKDPFTELVITYNSTYVLKGEFKPEEKDVDIMEFFKEWVRKSRSEILKYVYEKYPEYGKYSLIRDKILGS

SEQ ID NO: 41883 - protein, 85 aa, unidentified
  REGION 1..85: note = Description of Unknown:cds_NZ_WFIY01000004.1_cds_WP_155863506.1_1457 target sequence
VDATKLQKIFFLLEKEKGVELGLNFEPWFFGPYSELLQDYIDKLIELGEVDVIEHEVKDPFTELVITYNSTYVLKGEFKPEEKDV

SEQ ID NO: 41884 - protein, 85 aa, unidentified
  REGION 1..85: note = Description of Unknown:cds_NC_010495.1_cds_YP_001742044.1_7 target sequence
AISKNMKAFLDMLAYSEGTDNGRQKTNNHGYDVIVGGSLFTDYSDHPRKLISLPKLGIKSTAAGRYQVLAKFYDAYKKQLRLPDF

SEQ ID NO: 41885 - protein, 84 aa, unidentified
  REGION 1..84: note = Description of Unknown:cds_NC_010495.1_cds_YP_001742044.1_7 target sequence
AKFYDAYKKQLRLPDFSPASQDAIAMQLIRECKATSDIEAGRIADAIHKCRSRWASLPGAGYGQHEQKLDKLVQVYKEAGGVVA

SEQ ID NO: 41886 - protein, 85 aa, unidentified
  REGION 1..85: note = Description of Unknown:cds_NC_010495.1_cds_YP_001742044.1_7 target sequence
NHGYDVIVGGSLFTDYSDHPRKLISLPKLGIKSTAAGRYQVLAKFYDAYKKQLRLPDFSPASQDAIAMQLIRECKATSDIEAGRI

SEQ ID NO: 41887 - protein, 85 aa, unidentified
  REGION 1..85: note = Description of Unknown:vpeps_3UWA_1 target sequence
GSLKIKTIGDRCLRQKSEEVEFDKKEMSELYDQMCEAMWASDGIGLAAPQVGINKRVIVVDETTEEHGKYAHLMVNPKITWKSEE

SEQ ID NO: 41888 - protein, 85 aa, unidentified
  REGION 1..85: note = Description of Unknown:vpeps_3UWA_1 target sequence
YAHLMVNPKITWKSEEKVLFDEGCLSVPDQNGEVLRPKSIKVTFQNKDGKYKKWKLDGLAARVVQHEIDHLEGILFVDYFNDKEN

SEQ ID NO: 41889 - protein, 85 aa, unidentified
  REGION 1..85: note = Description of Unknown:vpeps_3UWA_1 target sequence
SELYDQMCEAMWASDGIGLAAPQVGINKRVIVVDETTEEHGKYAHLMVNPKITWKSEEKVLFDEGCLSVPDQNGEVLRPKSIKVT

SEQ ID NO: 41890 - protein, 85 aa, unidentified
  REGION 1..85: note = Description of Unknown:cds_NZ_WFIY01000004.1_cds_WP_155862836.1_668 target sequence
SEAQRDIERAEEYEETTPRTSVLGENRFELSTGLIIAARYADKLRRVALVSLGKMVPKDVIIRDVSEFNKNLYDKIVNQMKIDKL

SEQ ID NO: 41891 - protein, 84 aa, unidentified
  REGION 1..84: note = Description of Unknown:cds_NZ_WFIY01000004.1_cds_WP_155862836.1_668 target sequence
NKNLYDKIVNQMKIDKLDVIKLVVSVRYDKSQNKLIFEDTKIIRYYTEEECKKQYESVIQENEKLKKEISEIKKKLSDLLGSVQ

SEQ ID NO: 41892 - protein, 85 aa, unidentified
  REGION 1..85: note = Description of Unknown:cds_NZ_WFIY01000004.1_cds_WP_155862836.1_668 target sequence
FELSTGLIIAARYADKLRRVALVSLGKMVPKDVIIRDVSEFNKNLYDKIVNQMKIDKLDVIKLVVSVRYDKSQNKLIFEDTKIIR

SEQ ID NO: 41893 - protein, 85 aa, unidentified
  REGION 1..85: note = Description of Unknown:cds_NZ_WFIY01000004.1_cds_WP_155863003.1_882 target sequence
KYGVADTTFSRVDMGAIAIKVIKSEDPDAEIIRYTVPGIKDLPVAARRLIDSGCDGVITLGWVGKTMLDKYSYLAASIGLIMVQV

SEQ ID NO: 41894 - protein, 84 aa, unidentified
  REGION 1..84: note = Description of Unknown:cds_NZ_WFIY01000004.1_cds_WP_155863003.1_882 target sequence
DKYSYLAASIGLIMVQVLTSKHVIDVTVHEDEADNEEKLKEIAIDRASKHARNLVLLVKEGKNALTPYAGKGLRQGYKDAGSID

SEQ ID NO: 41895 - protein, 85 aa, unidentified
  REGION 1..85: note = Description of Unknown:cds_NZ_WFIY01000004.1_cds_WP_155863003.1_882 target sequence
DAEIIRYTVPGIKDLPVAARRLIDSGCDGVITLGWVGKTMLDKYSYLAASIGLIMVQVLTSKHVIDVTVHEDEADNEEKLKEIAI

SEQ ID NO: 41896 - protein, 85 aa, unidentified
  REGION 1..85: note = Description of Unknown:cds_NZ_WFIY01000004.1_cds_WP_155863253.1_1204 target sequence
KRVKGYLGHVKIDKEGKVIESNVDNAEEIAKILKFNVEKGNQEAKELGFNKINGFAMFGSTKSLTFMKDTALLVDNKKADWQELF

SEQ ID NO: 41897 - protein, 84 aa, unidentified
  REGION 1..84: note = Description of Unknown:cds_NZ_WFIY01000004.1_cds_WP_155863253.1_1204 target sequence
DTALLVDNKKADWQELFTTYTYVKSWLIGGIALLVLSLILYYLAIFTPYMDYFAPEPRFYTPTILLLISVFMLVLSKSKYSYRL

SEQ ID NO: 41898 - protein, 85 aa, unidentified
  REGION 1..85: note = Description of Unknown:cds_NZ_WFIY01000004.1_cds_WP_155863253.1_1204 target sequence
EIAKILKFNVEKGNQEAKELGFNKINGFAMFGSTKSLTFMKDTALLVDNKKADWQELFTTYTYVKSWLIGGIALLVLSLILYYLA

SEQ ID NO: 41899 - protein, 85 aa, unidentified
  REGION 1..85: note = Description of Unknown:cds_NZ_WFIY01000004.1_cds_WP_162309159.1_1284 target sequence
VLILIGNGVKLILRYGTAGSLNEKIKVGSYFIPIGVTHHDKSSLYQIIREDIMPALSPDLELAYKLYYFLKSQGLEVNYGTLFQS

SEQ ID NO: 41900 - protein, 84 aa, unidentified
  REGION 1..84: note = Description of Unknown:cds_NZ_WFIY01000004.1_cds_WP_162309159.1_1284 target sequence
LKSQGLEVNYGTLFQSDDFYSEIHLKFDDAVDMESGTIFLLSKIHGIRSASLLIIANYKGKWINYEEIYRRDSEKVLDFLINFV

SEQ ID NO: 41901 - protein, 85 aa, unidentified
  REGION 1..85: note = Description of Unknown:cds_NZ_WFIY01000004.1_cds_WP_162309159.1_1284 target sequence
GSYFIPIGVTHHDKSSLYQIIREDIMPALSPDLELAYKLYYFLKSQGLEVNYGTLFQSDDFYSEIHLKFDDAVDMESGTIFLLSK

SEQ ID NO: 41902 - protein, 85 aa, unidentified
  REGION 1..85: note = Description of Unknown:cds_NZ_WFIY01000004.1_cds_1676 target sequence
VADLGCGTGRFCAAASFLGAYCACIEIDNDSITLAKKVFKDLGIDADFINADVEYFYSQSKFDTVIENPPFGVKRKGYDLIFLNS

SEQ ID NO: 41903 - protein, 84 aa, unidentified
  REGION 1..84: note = Description of Unknown:cds_NZ_WFIY01000004.1_cds_1676 target sequence
PFGVKRKGYDLIFLNSALDLSNDVVYSIHKSNEKSEKIIKNIARKKGFSSEVITTNFEIGYYYPWHRNEIHKFLVDIYLFKKIT

SEQ ID NO: 41904 - protein, 85 aa, unidentified
  REGION 1..85: note = Description of Unknown:cds_NZ_WFIY01000004.1_cds_1676 target sequence
DNDSITLAKKVFKDLGIDADFINADVEYFYSQSKFDTVIENPPFGVKRKGYDLIFLNSALDLSNDVVYSIHKSNEKSEKIIKNIA

SEQ ID NO: 41905 - protein, 85 aa, unidentified
  REGION 1..85: note = Description of Unknown:cds_NC_035464.1_cds_YP_009408153.1_7 target sequence
TKKKKEEQEAPKEEGQATPETPSPETPQEPQKEDPVQVIMRLTTVIQEQQKRIDQLEANLNSVMEFLKAQSQAPQGQGGGGGLVE

SEQ ID NO: 41906 - protein, 84 aa, unidentified
  REGION 1..84: note = Description of Unknown:cds_NC_035464.1_cds_YP_009408153.1_7 target sequence
AQSQAPQGQGGGGGLVEALVPLLGKLMEPSKDPLRDIALELMIDSMKSNVELSKAITQKIIQGVQDRVARNVVETVATGVITHE

SEQ ID NO: 41907 - protein, 85 aa, unidentified
  REGION 1..85: note = Description of Unknown:cds_NC_035464.1_cds_YP_009408153.1_7 target sequence
QEPQKEDPVQVIMRLTTVIQEQQKRIDQLEANLNSVMEFLKAQSQAPQGQGGGGGLVEALVPLLGKLMEPSKDPLRDIALELMID

SEQ ID NO: 41908 - protein, 85 aa, unidentified
  REGION 1..85: note = Description of Unknown:cds_NZ_WFIY01000004.1_cds_WP_152940907.1_307 target sequence
ESKIRNYYAVKVTGGQEVSVGLMLEERAKTNNIPEIYSIIVPPGLKGYVIVEASGPHVVKLLIAGIRHVRGIAQGLVPKDDIVKM

SEQ ID NO: 41909 - protein, 84 aa, unidentified
  REGION 1..84: note = Description of Unknown:cds_NZ_WFIY01000004.1_cds_WP_152940907.1_307 target sequence
HVRGIAQGLVPKDDIVKMVSKKVTGPTIKEGDLVEVVSGPFRGMQAQVVKVTEGKGEVVLNILESAFPLQVTIPVDQVKPVKKT

SEQ ID NO: 41910 - protein, 85 aa, unidentified
  REGION 1..85: note = Description of Unknown:cds_NZ_WFIY01000004.1_cds_WP_152940907.1_307 target sequence
AKTNNIPEIYSIIVPPGLKGYVIVEASGPHVVKLLIAGIRHVRGIAQGLVPKDDIVKMVSKKVTGPTIKEGDLVEVVSGPFRGMQ

SEQ ID NO: 41911 - protein, 85 aa, unidentified
  REGION 1..85: note = Description of Unknown:cds_NZ_WFIY01000004.1_cds_WP_155862547.1_316 target sequence
ITADMVPPNLLIDKLANYIKENVKEVQPPEWAFFAKTASYKERVPDDLENWWYVRAASLLRKLYKEPFGVNTSRTIYSGLKRRGT

SEQ ID NO: 41912 - protein, 84 aa, unidentified
  REGION 1..84: note = Description of Unknown:cds_NZ_WFIY01000004.1_cds_WP_155862547.1_316 target sequence
FGVNTSRTIYSGLKRRGTKPPHTVKAPGHANRLIFQQLEKAGLVIKTKNGRSLSPKGRSLLDKLSYEIFKGLVENNPSLKKYLE

SEQ ID NO: 41913 - protein, 85 aa, unidentified
  REGION 1..85: note = Description of Unknown:cds_NZ_WFIY01000004.1_cds_WP_155862547.1_316 target sequence
PPEWAFFAKTASYKERVPDDLENWWYVRAASLLRKLYKEPFGVNTSRTIYSGLKRRGTKPPHTVKAPGHANRLIFQQLEKAGLVI

SEQ ID NO: 41914 - protein, 85 aa, unidentified
  REGION 1..85: note = Description of Unknown:cds_NZ_WFIY01000004.1_cds_WP_155862729.1_536 target sequence
QRHFLSEKETEELLEKIKEKYNVSLSPQKVEIGKEKKEVYYFLDGVLSFFSQDLIPTLCAIYKFNISLPSVKVDEGAVRAVLKGA

SEQ ID NO: 41915 - protein, 84 aa, unidentified
  REGION 1..84: note = Description of Unknown:cds_NZ_WFIY01000004.1_cds_WP_155862729.1_536 target sequence
LPSVKVDEGAVRAVLKGADLFVPGIKEYNCNCKPGDIIAVTTMEGKAIAIMKVLISKEDAEKEKKGKFSKNLHYLGDEIWKMCK

SEQ ID NO: 41916 - protein, 85 aa, unidentified
  REGION 1..85: note = Description of Unknown:cds_NZ_WFIY01000004.1_cds_WP_155862729.1_536 target sequence
QKVEIGKEKKEVYYFLDGVLSFFSQDLIPTLCAIYKFNISLPSVKVDEGAVRAVLKGADLFVPGIKEYNCNCKPGDIIAVTTMEG

SEQ ID NO: 41917 - protein, 85 aa, unidentified
  REGION 1..85: note = Description of Unknown:cds_NZ_WFIY01000004.1_cds_WP_013775529.1_881 target sequence
QDQSIKLGLVVAEFNYDITYLMLQRAISHAEFLGAKVSVIFKVPGSFEIPLAVKKLIKLDVDCIAVLGAIIKGETKHDELIANQI

SEQ ID NO: 41918 - protein, 84 aa, unidentified
  REGION 1..84: note = Description of Unknown:cds_NZ_WFIY01000004.1_cds_WP_013775529.1_881 target sequence
GAIIKGETKHDELIANQIARLISDLEVEYEKPIGLGIIGPGATHEQAVERIEEYATRAVEAAIKMAKRLRKIPEKLNEEKVIIE

SEQ ID NO: 41919 - protein, 85 aa, unidentified
  REGION 1..85: note = Description of Unknown:cds_NZ_WFIY01000004.1_cds_WP_013775529.1_881 target sequence
SHAEFLGAKVSVIFKVPGSFEIPLAVKKLIKLDVDCIAVLGAIIKGETKHDELIANQIARLISDLEVEYEKPIGLGIIGPGATHE

SEQ ID NO: 41920 - protein, 85 aa, unidentified
  REGION 1..85: note = Description of Unknown:cds_NZ_WFIY01000004.1_cds_WP_155863011.1_891 target sequence
NKKRARGKSHSTRPVRAGAPKWVRFTREEVEMLVEELAKRGYGPSMIGVILRDQYGVPLVKQITGKKLTQILEEKGLAPKIPEDL

SEQ ID NO: 41921 - protein, 84 aa, unidentified
  REGION 1..84: note = Description of Unknown:cds_NZ_WFIY01000004.1_cds_WP_155863011.1_891 target sequence
LTQILEEKGLAPKIPEDLFNLIRKAVNVRRHLTEYPKDKVSKKGLEEIESKIRRLVDYYKEVGKLPANWNYDPATAELLITSTS

SEQ ID NO: 41922 - protein, 85 aa, unidentified
  REGION 1..85: note = Description of Unknown:cds_NZ_WFIY01000004.1_cds_WP_155863011.1_891 target sequence
EEVEMLVEELAKRGYGPSMIGVILRDQYGVPLVKQITGKKLTQILEEKGLAPKIPEDLFNLIRKAVNVRRHLTEYPKDKVSKKGL

SEQ ID NO: 41923 - protein, 85 aa, unidentified
  REGION 1..85: note = Description of Unknown:cds_NZ_WFIY01000004.1_cds_WP_155863131.1_1052 target sequence
LAPFIPTPEEVIKEMLSCANVGRKDIIVDFGSGDGRILKVAKTYFHVKLAIGVELNKILCKESKSKDVEIICGDLLSLSEVLIPR

SEQ ID NO: 41924 - protein, 84 aa, unidentified
  REGION 1..84: note = Description of Unknown:cds_NZ_WFIY01000004.1_cds_WP_155863131.1_1052 target sequence
VEIICGDLLSLSEVLIPRATVITTYLSPRSNELLEDIILRNGKKGLKVISHDFEFNKLPLEKIKKVKAMGLLGLTEHTIYCYKL

SEQ ID NO: 41925 - protein, 85 aa, unidentified
  REGION 1..85: note = Description of Unknown:cds_NZ_WFIY01000004.1_cds_WP_155863131.1_1052 target sequence
VDFGSGDGRILKVAKTYFHVKLAIGVELNKILCKESKSKDVEIICGDLLSLSEVLIPRATVITTYLSPRSNELLEDIILRNGKKG

SEQ ID NO: 41926 - protein, 85 aa, unidentified
  REGION 1..85: note = Description of Unknown:cds_NZ_WFIY01000004.1_cds_WP_155863820.1_1713 target sequence
ENFRELIIDAVLSKRIKNFKDIESEGIRKRNICSYFNGKICRIKFEESVVSSWLSQEGITPHPVLCYICPYFSLKEEEESIKSSL

SEQ ID NO: 41927 - protein, 84 aa, unidentified
  REGION 1..84: note = Description of Unknown:cds_NZ_WFIY01000004.1_cds_WP_155863820.1_1713 target sequence
ICPYFSLKEEEESIKSSLFDIYAYYAKLKESVEKELQFIESRINNFVYSSVSLRRRREELIYLLDDINEKIKITTELIKLSEYS

SEQ ID NO: 41928 - protein, 85 aa, unidentified
  REGION 1..85: note = Description of Unknown:cds_NZ_WFIY01000004.1_cds_WP_155863820.1_1713 target sequence
RKRNICSYFNGKICRIKFEESVVSSWLSQEGITPHPVLCYICPYFSLKEEEESIKSSLFDIYAYYAKLKESVEKELQFIESRINN

SEQ ID NO: 41929 - protein, 85 aa, unidentified
  REGION 1..85: note = Description of Unknown:cds_NZ_WFIY01000004.1_cds_WP_155863948.1_1868 target sequence
SEHYYLDDVDKKIISILQQDSRISFSRLAKMLNLSESTIHMRIKRLKEAGVIRGFCIDVDLDKVGMNVLAFVLLKADPKKYEDIL

SEQ ID NO: 41930 - protein, 84 aa, unidentified
  REGION 1..84: note = Description of Unknown:cds_NZ_WFIY01000004.1_cds_WP_155863948.1_1868 target sequence
VLAFVLLKADPKKYEDILRKLAEIKEVFEIYDVTGEYYALLKVRVSDKEELAKVLDKIGNMEGVTSTYTMFVLRVIKEKKNAFE

SEQ ID NO: 41931 - protein, 85 aa, unidentified
  REGION 1..85: note = Description of Unknown:cds_NZ_WFIY01000004.1_cds_WP_155863948.1_1868 target sequence
LAKMLNLSESTIHMRIKRLKEAGVIRGFCIDVDLDKVGMNVLAFVLLKADPKKYEDILRKLAEIKEVFEIYDVTGEYYALLKVRV

SEQ ID NO: 41932 - protein, 85 aa, unidentified
  REGION 1..85: note = Description of Unknown:cds_NZ_WFIY01000004.1_cds_WP_155864092.1_2038 target sequence
QIEIPDVIYSFITESLGKDVSDTLVEAFLTSLDREDRIRVYIKLSKEYEEKAKDGETCWKALSYLFKAIAEIEGMEISSYQDYYN

SEQ ID NO: 41933 - protein, 84 aa, unidentified
  REGION 1..84: note = Description of Unknown:cds_NZ_WFIY01000004.1_cds_WP_155864092.1_2038 target sequence
AIAEIEGMEISSYQDYYNLAEYLSFKENNTEIVKYFLNAEKLHAEFHPRPQDKETFKIRMEYCKKLIEIAKGYLRKSKSFSEED

SEQ ID NO: 41934 - protein, 85 aa, unidentified
  REGION 1..85: note = Description of Unknown:cds_NZ_WFIY01000004.1_cds_WP_155864092.1_2038 target sequence
FLTSLDREDRIRVYIKLSKEYEEKAKDGETCWKALSYLFKAIAEIEGMEISSYQDYYNLAEYLSFKENNTEIVKYFLNAEKLHAE

SEQ ID NO: 41935 - protein, 85 aa, unidentified
  REGION 1..85: note = Description of Unknown:cds_NZ_WFIY01000004.1_cds_WP_155864143.1_2096 target sequence
ESKRKLGLVFASGASNRICCVAIYGGAALAAGWEVILHLVNEGVVAFRKDVLPKLNTLGLEMTIKPEFYTPYTDQFLKNVENAVK

SEQ ID NO: 41936 - protein, 84 aa, unidentified
  REGION 1..84: note = Description of Unknown:cds_NZ_WFIY01000004.1_cds_WP_155864143.1_2096 target sequence
FYTPYTDQFLKNVENAVKNGQLKDWYSFLKQLKMDYKDSFRIYACPVASAFYNVKKEDLVDIVDDIKGAETFLEEVYGGVVMYI

SEQ ID NO: 41937 - protein, 85 aa, unidentified
  REGION 1..85: note = Description of Unknown:cds_NZ_WFIY01000004.1_cds_WP_155864143.1_2096 target sequence
ALAAGWEVILHLVNEGVVAFRKDVLPKLNTLGLEMTIKPEFYTPYTDQFLKNVENAVKNGQLKDWYSFLKQLKMDYKDSFRIYAC

SEQ ID NO: 41938 - protein, 85 aa, unidentified
  REGION 1..85: note = Description of Unknown:cds_NC_035460.1_cds_YP_009408116.1_165 target sequence
AAFFTPTYLCKDFLLSEDDIVTAVEDYITWCSLGLKYRPKAGNLFKMLDTFKLDAIKLFGNIKTQHEIFLSFQLKETNNLDAIEL

SEQ ID NO: 41939 - protein, 84 aa, unidentified
  REGION 1..84: note = Description of Unknown:cds_NC_035460.1_cds_YP_009408116.1_165 target sequence
IFLSFQLKETNNLDAIELYIKSFYSNNIINNVCATIGLMALAAEYYGGKNKPTNETFKIIGMINSIFDSFDFNLVKSIIINRIN

SEQ ID NO: 41940 - protein, 85 aa, unidentified
  REGION 1..85: note = Description of Unknown:cds_NC_035460.1_cds_YP_009408116.1_165 target sequence
ITWCSLGLKYRPKAGNLFKMLDTFKLDAIKLFGNIKTQHEIFLSFQLKETNNLDAIELYIKSFYSNNIINNVCATIGLMALAAEY

SEQ ID NO: 41941 - protein, 85 aa, unidentified
  REGION 1..85: note = Description of Unknown:hvTR_Q6TUS7 target sequence
AKKVSLQNIVISSPKSVVKTVKEEEMSSILPKYYRSVAEVTLSLNTNTDRCWFCYQNLVMKPHYFVETLKGGKVGVFCSSICRDS

SEQ ID NO: 41942 - protein, 84 aa, unidentified
  REGION 1..84: note = Description of Unknown:hvTR_Q6TUS7 target sequence
ETLKGGKVGVFCSSICRDSFSSIIKSHVAIREEPKITLLPLVFYKDPEKVVNIINTLKNKEGIYGSCFYKENDKSIQISLRSLF

SEQ ID NO: 41943 - protein, 85 aa, unidentified
  REGION 1..85: note = Description of Unknown:hvTR_Q6TUS7 target sequence
SILPKYYRSVAEVTLSLNTNTDRCWFCYQNLVMKPHYFVETLKGGKVGVFCSSICRDSFSSIIKSHVAIREEPKITLLPLVFYKD

SEQ ID NO: 41944 - protein, 85 aa, unidentified
  REGION 1..85: note = Description of Unknown:cds_NZ_WFIY01000004.1_cds_WP_155863053.1_951 target sequence
SEVVIVNAENQILGRMATNVVKLLKEGKKVVIVNAEKAVISGPKSRVVAGYKLYFSLRTLFNPEKQGVRRPRSPINIVKRTIRGM

SEQ ID NO: 41945 - protein, 84 aa, unidentified
  REGION 1..84: note = Description of Unknown:cds_NZ_WFIY01000004.1_cds_WP_155863053.1_951 target sequence
GVRRPRSPINIVKRTIRGMLPKTPKGRQMLKSVKVYIGVPQQYNGKNFISFPDADVKRLKGKYITVGELAKEMGWKVYVRAAGQ

SEQ ID NO: 41946 - protein, 85 aa, unidentified
  REGION 1..85: note = Description of Unknown:cds_NZ_WFIY01000004.1_cds_WP_155863053.1_951 target sequence
KKVVIVNAEKAVISGPKSRVVAGYKLYFSLRTLFNPEKQGVRRPRSPINIVKRTIRGMLPKTPKGRQMLKSVKVYIGVPQQYNGK

SEQ ID NO: 41947 - protein, 85 aa, unidentified
  REGION 1..85: note = Description of Unknown:cds_NZ_WFIY01000004.1_cds_WP_155864224.1_2193 target sequence
VKIGDKAPLFEAINDNGDKIALSDFIGKHNIVLYFYPKDDTPGCTREACAFRDNWDLLKDYDVVVIGVSSDNVESHKRFKEKYNL

SEQ ID NO: 41948 - protein, 84 aa, unidentified
  REGION 1..84: note = Description of Unknown:cds_NZ_WFIY01000004.1_cds_WP_155864224.1_2193 target sequence
GVSSDNVESHKRFKEKYNLPFILISDPDGKIRELYGAKGFILPGRVTFVIDKNGIIMHVYKSQFNPVNHVKEALRALEEIKKNE

SEQ ID NO: 41949 - protein, 85 aa, unidentified
  REGION 1..85: note = Description of Unknown:cds_NZ_WFIY01000004.1_cds_WP_155864224.1_2193 target sequence
KHNIVLYFYPKDDTPGCTREACAFRDNWDLLKDYDVVVIGVSSDNVESHKRFKEKYNLPFILISDPDGKIRELYGAKGFILPGRV

SEQ ID NO: 41950 - protein, 85 aa, unidentified
  REGION 1..85: note = Description of Unknown:cds_NC_035460.1_cds_YP_009408047.1_96 target sequence
ASKRVTLSDVIISNPKSVIKQQKEEALTGLLPKYFQLMTDKVLEVNVDDTLCWFCNQKIKISCYRVETLKGGYIGWFCSKICKDS

SEQ ID NO: 41951 - protein, 84 aa, unidentified
  REGION 1..84: note = Description of Unknown:cds_NC_035460.1_cds_YP_009408047.1_96 target sequence
ETLKGGYIGWFCSKICKDSFATSVKSQIALREEPKISLLPLVCYKNKDDVLNIINDLKDKEGVYGSCFYKENNQTIQILLRSLI

SEQ ID NO: 41952 - protein, 85 aa, unidentified
  REGION 1..85: note = Description of Unknown:cds_NC_035460.1_cds_YP_009408047.1_96 target sequence
TGLLPKYFQLMTDKVLEVNVDDTLCWFCNQKIKISCYRVETLKGGYIGWFCSKICKDSFATSVKSQIALREEPKISLLPLVCYKN

SEQ ID NO: 41953 - protein, 85 aa, unidentified
  REGION 1..85: note = Description of Unknown:hvTR_Q6TVB2 target sequence
KRIALCRVDISAPRASACPPPAAGRIEYVLPKYFNSVSSDRLALRAADGSCWFCKQRVGAAPLAVETLDGAAIGEFCSRLCRDSF

SEQ ID NO: 41954 - protein, 84 aa, unidentified
  REGION 1..84: note = Description of Unknown:hvTR_Q6TVB2 target sequence
ETLDGAAIGEFCSRLCRDSFAGLVKHLVALREEPKIELLPLEMYADPDRVRALINETRELDGVYGRCYVERDGRAARMALKSLI

SEQ ID NO: 41955 - protein, 85 aa, unidentified
  REGION 1..85: note = Description of Unknown:hvTR_Q6TVB2 target sequence
YVLPKYFNSVSSDRLALRAADGSCWFCKQRVGAAPLAVETLDGAAIGEFCSRLCRDSFAGLVKHLVALREEPKIELLPLEMYADP

SEQ ID NO: 41956 - protein, 85 aa, unidentified
  REGION 1..85: note = Description of Unknown:hvTR_Q0NPV7 target sequence
AKRVSLPDVVISAPKAVFKPAKEEALACILPKYYKSMADVSIKTNSVIDKCWFCNQDLVFKPISIETYKGGEVGYFCSKICRDSL

SEQ ID NO: 41957 - protein, 84 aa, unidentified
  REGION 1..84: note = Description of Unknown:hvTR_Q0NPV7 target sequence
ETYKGGEVGYFCSKICRDSLASMVKSHVALREEPKISLLPLVFYEDKEKVINTINLLRDKDGVYGSCYFKENSQIIDISLRSLL

SEQ ID NO: 41958 - protein, 85 aa, unidentified
  REGION 1..85: note = Description of Unknown:hvTR_Q0NPV7 target sequence
CILPKYYKSMADVSIKTNSVIDKCWFCNQDLVFKPISIETYKGGEVGYFCSKICRDSLASMVKSHVALREEPKISLLPLVFYEDK

SEQ ID NO: 41959 - protein, 85 aa, unidentified
  REGION 1..85: note = Description of Unknown:hvTR_Q5IXR4 target sequence
AKRVSLPDVVISAPKAVFKPAKEEALACILPKYYKSMADMSIKTNSVIDKCWFCNQDLVFRPISIETFKGGEVGYFCSKICRDSL

SEQ ID NO: 41960 - protein, 84 aa, unidentified
  REGION 1..84: note = Description of Unknown:hvTR_Q5IXR4 target sequence
ETFKGGEVGYFCSKICRDSLASMVKSHVALREEPKISLLPLVFYEDKEKVINTINLLRDKDGVYGSCYFKENSQIIDISLRSLL

SEQ ID NO: 41961 - protein, 85 aa, unidentified
  REGION 1..85: note = Description of Unknown:hvTR_Q5IXR4 target sequence
CILPKYYKSMADMSIKTNSVIDKCWFCNQDLVFRPISIETFKGGEVGYFCSKICRDSLASMVKSHVALREEPKISLLPLVFYEDK

SEQ ID NO: 41962 - protein, 85 aa, unidentified
  REGION 1..85: note = Description of Unknown:hvTR_Q6TVP4 target sequence
KRIALSRVDISAPRASACAPPAACRIEYVLPKYFNTVSAERLALRAADGTCWFCRQRVSTAALAVETLDGGAVGEFCSRLCRDSF

SEQ ID NO: 41963 - protein, 84 aa, unidentified
  REGION 1..84: note = Description of Unknown:hvTR_Q6TVP4 target sequence
ETLDGGAVGEFCSRLCRDSFAGSIRHLVALREEPKIELLPLEMYADPDRVRALINETRATEGVYGRCYLEADGRTVRMALKSLI

SEQ ID NO: 41964 - protein, 85 aa, unidentified
  REGION 1..85: note = Description of Unknown:hvTR_Q6TVP4 target sequence
YVLPKYFNTVSAERLALRAADGTCWFCRQRVSTAALAVETLDGGAVGEFCSRLCRDSFAGSIRHLVALREEPKIELLPLEMYADP

SEQ ID NO: 41965 - protein, 85 aa, unidentified
  REGION 1..85: note = Description of Unknown:hvTR_D3IZM4 target sequence
KRIALSRVDISAPRASACAPPAAGRIEYVLPKYFNTVSAERLALRAADGSCWFCRQRVGAAALAVETLDGGAVGEFCSRLCRDSF

SEQ ID NO: 41966 - protein, 84 aa, unidentified
  REGION 1..84: note = Description of Unknown:hvTR_D3IZM4 target sequence
ETLDGGAVGEFCSRLCRDSFAGSIRHLVALREEPKIELLPLEMYADPDRVRALINETRELEGVYGRCYLEADGRTVRMALKSLI

SEQ ID NO: 41967 - protein, 85 aa, unidentified
  REGION 1..85: note = Description of Unknown:hvTR_D3IZM4 target sequence
YVLPKYFNTVSAERLALRAADGSCWFCRQRVGAAALAVETLDGGAVGEFCSRLCRDSFAGSIRHLVALREEPKIELLPLEMYADP

SEQ ID NO: 41968 - protein, 85 aa, unidentified
  REGION 1..85: note = Description of Unknown:hvTR_A7XCL8 target sequence
AKKVSLPNIVISSPKSVVKPVRDEEISCILPKYYRSVADVTLSLNANTDYCWFCYQNLIIQPYFVETLKGGKVGVFCSNICRDSF

SEQ ID NO: 41969 - protein, 84 aa, unidentified
  REGION 1..84: note = Description of Unknown:hvTR_A7XCL8 target sequence
ETLKGGKVGVFCSNICRDSFSSMIRTHVAIREEPKITLLPLVFYKDPEKVVNIINTLKNKEGVYGSCFYKENDKSIQISLRSLL

SEQ ID NO: 41970 - protein, 85 aa, unidentified
  REGION 1..85: note = Description of Unknown:hvTR_A7XCL8 target sequence
CILPKYYRSVADVTLSLNANTDYCWFCYQNLIIQPYFVETLKGGKVGVFCSNICRDSFSSMIRTHVAIREEPKITLLPLVFYKDP

SEQ ID NO: 41971 - protein, 85 aa, unidentified
  REGION 1..85: note = Description of Unknown:hvTR_P07610 target sequence
AKRVSLPDVVISAPKAVFKPAKEEALACILPKYYKSMADVSIKTNSVIDKCWFCNQDLVFKPISIETFKGGEVGYFCSKICRDSL

SEQ ID NO: 41972 - protein, 84 aa, unidentified; identical to SEQ ID NO: 41960
  REGION 1..84: note = Description of Unknown:hvTR_P07610 target sequence

SEQ ID NO: 41973 - protein, 85 aa, unidentified
  REGION 1..85: note = Description of Unknown:hvTR_P07610 target sequence
CILPKYYKSMADVSIKTNSVIDKCWFCNQDLVFKPISIETFKGGEVGYFCSKICRDSLASMVKSHVALREEPKISLLPLVFYEDK

SEQ ID NO: 41974 - protein, 85 aa, unidentified; identical to SEQ ID NO: 41959
  REGION 1..85: note = Description of Unknown:hvTR_P0DSV3 target sequence

SEQ ID NO: 41975 - protein, 84 aa, unidentified; identical to SEQ ID NO: 41960
  REGION 1..84: note = Description of Unknown:hvTR_P0DSV3 target sequence

SEQ ID NO: 41976 - protein, 85 aa, unidentified; identical to SEQ ID NO: 41961
  REGION 1..85: note = Description of Unknown:hvTR_P0DSV3 target sequence

SEQ ID NO: 41977 - protein, 85 aa, unidentified
  REGION 1..85: note = Description of Unknown:hvTR_Q9DHM2 target sequence
AKKVSLPNIVISSPKSVVKPVRDEEISCILPKYYKSVADVTLSLNANTDYCWFCYQNLIIQPYFVETLKGGKVGAFCSNICRDSF

SEQ ID NO: 41978 - protein, 84 aa, unidentified
  REGION 1..84: note = Description of Unknown:hvTR_Q9DHM2 target sequence
ETLKGGKVGAFCSNICRDSFSSMIRTHVAIREEPKITLLPLVFYKDPEKVVNIINTLKNKEGVYGSCFYKENDKSIQISLRSLL

SEQ ID NO: 41979 - protein, 85 aa, unidentified
  REGION 1..85: note = Description of Unknown:hvTR_Q9DHM2 target sequence
CILPKYYKSVADVTLSLNANTDYCWFCYQNLIIQPYFVETLKGGKVGAFCSNICRDSFSSMIRTHVAIREEPKITLLPLVFYKDP

SEQ ID NO: 41980 - protein, 85 aa, unidentified
  REGION 1..85: note = Description of Unknown:vpeps_3FAJ_1 target sequence
GSSHHHHHHSSGLVPRGSHMAKYEPKKGDYAGGAVKILDMFENGQLGYPEVTLKLAGEEANARRAGDERTKEAIHAIVKMISDAM

SEQ ID NO: 41981 - protein, 85 aa, unidentified
  REGION 1..85: note = Description of Unknown:vpeps_3FAJ_1 target sequence
GDERTKEAIHAIVKMISDAMKPYRNKGSGFQSQPIPGEVIAQVTSNPEYQQAKAFLASPATQVRNIEREEVLSKGAKKLAQAMAS

SEQ ID NO: 41982 - protein, 85 aa, unidentified
  REGION 1..85: note = Description of Unknown:vpeps_3FAJ_1 target sequence
GDYAGGAVKILDMFENGQLGYPEVTLKLAGEEANARRAGDERTKEAIHAIVKMISDAMKPYRNKGSGFQSQPIPGEVIAQVTSNP

SEQ ID NO: 41983 - protein, 85 aa, unidentified
  REGION 1..85: note = Description of Unknown:cds_NZ_WFIY01000004.1_cds_WP_155862300.1_15 target sequence
VSQKNSESLVSELANQINELYLTNPTQVIKLAKKAGVENPTFLVTPPTKPTNELSFAKLSNIAETVSKLEKYGLPSLLRQYFMNV

SEQ ID NO: 41984 - protein, 84 aa, unidentified
  REGION 1..84: note = Description of Unknown:cds_NZ_WFIY01000004.1_cds_WP_155862300.1_15 target sequence
VSKLEKYGLPSLLRQYFMNVVKNPAVINNVVETYYKVAKIIPKEVENKEPVVISENEGFVSKSIPLWLATDLLAVIDRLWNILR

SEQ ID NO: 41985 - protein, 85 aa, unidentified
  REGION 1..85: note = Description of Unknown:cds_NZ_WFIY01000004.1_cds_WP_155862300.1_15 target sequence
VIKLAKKAGVENPTFLVTPPTKPTNELSFAKLSNIAETVSKLEKYGLPSLLRQYFMNVVKNPAVINNVVETYYKVAKIIPKEVEN

SEQ ID NO: 41986 - protein, 85 aa, unidentified
  REGION 1..85: note = Description of Unknown:cds_NZ_WFIY01000004.1_cds_WP_155862928.1_780 target sequence
KVTSVSFQIFCHETEDVEKIKNALNSFLQDFLKYANISENPTEGHYGDKITLIKYDFQGKISEKIVDYLFSKLDKADLLYLVSTI

SEQ ID NO: 41987 - protein, 84 aa, unidentified
  REGION 1..84: note = Description of Unknown:cds_NZ_WFIY01000004.1_cds_WP_155862928.1_780 target sequence
VDYLFSKLDKADLLYLVSTIDSRLEKSKIHIRIDKQKFIAEGKLYLRDGDDIIKIIISSVGGPKRVKEELNKIANRAMHTQFQD

SEQ ID NO: 41988 - protein, 85 aa, unidentified
  REGION 1..85: note = Description of Unknown:cds_NZ_WFIY01000004.1_cds_WP_155862928.1_780 target sequence
LQDFLKYANISENPTEGHYGDKITLIKYDFQGKISEKIVDYLFSKLDKADLLYLVSTIDSRLEKSKIHIRIDKQKFIAEGKLYLR

SEQ ID NO: 41989 - protein, 85 aa, unidentified
  REGION 1..85: note = Description of Unknown:cds_NZ_WFIY01000004.1_cds_1809 target sequence
IKILDIEIPCDTECLRNSNFKELLNNENFKEQLEILDSLENLIDDNINTLLQELEFRFSKYRINLENLAYTIYKIVEEGGNVIVG

SEQ ID NO: 41990 - protein, 84 aa, unidentified
  REGION 1..84: note = Description of Unknown:cds_NZ_WFIY01000004.1_cds_1809 target sequence
NLAYTIYKIVEEGGNVIVGNNSIIFEDKVIAKGDEFNSLYEIAKLIDEIKNDENIRSLCDEIKYLADSLWEHFNKNLRRALNES

SEQ ID NO: 41991 - protein, 85 aa, unidentified
  REGION 1..85: note = Description of Unknown:cds_NZ_WFIY01000004.1_cds_1809 target sequence
NFKEQLEILDSLENLIDDNINTLLQELEFRFSKYRINLENLAYTIYKIVEEGGNVIVGNNSIIFEDKVIAKGDEFNSLYEIAKLI

SEQ ID NO: 41992 - protein, 85 aa, unidentified
  REGION 1..85: note = Description of Unknown:cds_NZ_WFIY01000004.1_cds_WP_155864123.1_2074 target sequence
EPVLVGITREGKIFEKGFVTSAGFLDIQLSSEYSSFSLNDQITCVKIKNKSILNGDEIEVDCVNFLKRYVNCIEDLLNNFYHCNN

SEQ ID NO: 41993 - protein, 84 aa, unidentified
  REGION 1..84: note = Description of Unknown:cds_NZ_WFIY01000004.1_cds_WP_155864123.1_2074 target sequence
LKRYVNCIEDLLNNFYHCNNKELIENVKLLNEKIKYIVYLKEDEIILPFVGEEEMDSLSFKILRDYKERFYKVKEAKPHDSPRM

SEQ ID NO: 41994 - protein, 85 aa, unidentified
  REGION 1..85: note = Description of Unknown:cds_NZ_WFIY01000004.1_cds_WP_155864123.1_2074 target sequence
QLSSEYSSFSLNDQITCVKIKNKSILNGDEIEVDCVNFLKRYVNCIEDLLNNFYHCNNKELIENVKLLNEKIKYIVYLKEDEIIL

SEQ ID NO: 41995 - protein, 85 aa, unidentified
  REGION 1..85: note = Description of Unknown:cds_NC_030656.1_cds_YP_009268809.1_94 target sequence
AKRVSLPNVVINAPKAAIKSTYKESLGCVLPSYYKTLNDSILSLNTKSDCCWFCNQQLDGKYLSIETLMNSFVGYFCSRICRDSF

SEQ ID NO: 41996 - protein, 84 aa, unidentified
  REGION 1..84: note = Description of Unknown:cds_NC_030656.1_cds_YP_009268809.1_94 target sequence
ETLMNSFVGYFCSRICRDSFACMVKTHIALREEPKISLLPLTCYKDPEKVIKIINECKEEEGLYGNCFFNEKTNTIQMSLRSLY

SEQ ID NO: 41997 - protein, 85 aa, unidentified
  REGION 1..85: note = Description of Unknown:cds_NC_030656.1_cds_YP_009268809.1_94 target sequence
CVLPSYYKTLNDSILSLNTKSDCCWFCNQQLDGKYLSIETLMNSFVGYFCSRICRDSFACMVKTHIALREEPKISLLPLTCYKDP

SEQ ID NO: 41998 - protein, 85 aa, unidentified
  REGION 1..85: note = Description of Unknown:cds_NC_005830.1_cds_YP_003726.1_1 target sequence
SEDLTFEERYQKDIRRRESFFSDFHLTDYSNYLGMKDTDELQTKGYVVYIADGYITEYILRYFDKQYAVIDDYLYYVLIVKFMGG

SEQ ID NO: 41999 - protein, 84 aa, unidentified
  REGION 1..84: note = Description of Unknown:cds_NC_005830.1_cds_YP_003726.1_1 target sequence
QYAVIDDYLYYVLIVKFMGGFKVFIYEYSYGKLLESDLSDYSIFEKSIADINSLISSCYHIALSLSHTFFNITEYYTKYISNFK

SEQ ID NO: 42000 - protein, 85 aa, unidentified
  REGION 1..85: note = Description of Unknown:cds_NC_005830.1_cds_YP_003726.1_1 target sequence
DYSNYLGMKDTDELQTKGYVVYIADGYITEYILRYFDKQYAVIDDYLYYVLIVKFMGGFKVFIYEYSYGKLLESDLSDYSIFEKS

SEQ ID NO: 42001 - protein, 85 aa, unidentified
  REGION 1..85: note = Description of Unknown:cds_NC_024711.1_cds_YP_009052520.1_41 target sequence
AKFIGVKMIEAVPMTAREANDKGYKIGNHSFEEDGYEVTYPDGYKSWSPVKEFEKAYYKLEDPAGDVLKENDIKRFIKGIENVKV

SEQ ID NO: 42002 - protein, 84 aa, unidentified
  REGION 1..84: note = Description of Unknown:cds_NC_024711.1_cds_YP_009052520.1_41 target sequence
GDVLKENDIKRFIKGIENVKVGTKTTNTTLTCLTGFEVHGQAACVKPENFDLNVGSNYARIKAEDKIWEGLGFVLQWAKYGLKK

SEQ ID NO: 42003 - protein, 85 aa, unidentified
  REGION 1..85: note = Description of Unknown:cds_NC_024711.1_cds_YP_009052520.1_41 target sequence
NHSFEEDGYEVTYPDGYKSWSPVKEFEKAYYKLEDPAGDVLKENDIKRFIKGIENVKVGTKTTNTTLTCLTGFEVHGQAACVKPE

SEQ ID NO: 42004 - protein, 85 aa, unidentified
  REGION 1..85: note = Description of Unknown:cds_NZ_WFIY01000004.1_cds_WP_155862391.1_128 target sequence
IVYGLYKSPLGDITVAKSEKGFVMLDFCNCVEKNSLDNDAFSDFFEKLDKYFEGKEVDLREPLDINVNPFRLSVFKEVMKIPWGK

SEQ ID NO: 42005 - protein, 84 aa, unidentified
  REGION 1..84: note = Description of Unknown:cds_NZ_WFIY01000004.1_cds_WP_155862391.1_128 target sequence
INVNPFRLSVFKEVMKIPWGKTKTYGEIAKILGTSPRAVGIALSKNPVLLIIPCHRVISEKGLGGYSRGIEIKKKLLELEGIKI

SEQ ID NO: 42006 - protein, 85 aa, unidentified
  REGION 1..85: note = Description of Unknown:cds_NZ_WFIY01000004.1_cds_WP_155862391.1_128 target sequence
CNCVEKNSLDNDAFSDFFEKLDKYFEGKEVDLREPLDINVNPFRLSVFKEVMKIPWGKTKTYGEIAKILGTSPRAVGIALSKNPV

SEQ ID NO: 42007 - protein, 85 aa, unidentified
  REGION 1..85: note = Description of Unknown:cds_NZ_WFIY01000004.1_cds_WP_048054614.1_489 target sequence
KPIDMKSLINYVALKILGGSDYLLNALEEYLVNGEGPAIVAHRYNISKHQLRGYAQRIIEKSGSECRAKKIIPILKQISVDVKPI

SEQ ID NO: 42008 - protein, 84 aa, unidentified
  REGION 1..84: note = Description of Unknown:cds_NZ_WFIY01000004.1_cds_WP_048054614.1_489 target sequence
ECRAKKIIPILKQISVDVKPIITRDENGVYTCTICNTIVAREDAEEHVRKYHKDQLTLAIKSMMEKLDEIRAKKAKAVILTSAS

SEQ ID NO: 42009 - protein, 85 aa, unidentified
  REGION 1..85: note = Description of Unknown:cds_NZ_WFIY01000004.1_cds_WP_048054614.1_489 target sequence
EEYLVNGEGPAIVAHRYNISKHQLRGYAQRIIEKSGSECRAKKIIPILKQISVDVKPIITRDENGVYTCTICNTIVAREDAEEHV

SEQ ID NO: 42010 - protein, 85 aa, unidentified
  REGION 1..85: note = Description of Unknown:cds_NZ_WFIY01000004.1_cds_WP_155863158.1_1087 target sequence
TEARMVDISEKQPVLRIAVAEGYIKLKKETINKIKRGEIEKGDVITVAKVAGIMAAKKTPEILPMCHPIPLESINVDVELEEDKV

SEQ ID NO: 42011 - protein, 84 aa, unidentified
  REGION 1..84: note = Description of Unknown:cds_NZ_WFIY01000004.1_cds_WP_155863158.1_1087 target sequence
MCHPIPLESINVDVELEEDKVRVKTEVKAHYKTGVEMEALTATSVALLTIWDMVKKYEKNEEGQYTTTQIDGIKVVNKLKISSS

SEQ ID NO: 42012 - protein, 85 aa, unidentified
  REGION 1..85: note = Description of Unknown:cds_NZ_WFIY01000004.1_cds_WP_155863158.1_1087 target sequence
KETINKIKRGEIEKGDVITVAKVAGIMAAKKTPEILPMCHPIPLESINVDVELEEDKVRVKTEVKAHYKTGVEMEALTATSVALL

SEQ ID NO: 42013 - protein, 85 aa, unidentified
  REGION 1..85: note = Description of Unknown:cds_NZ_WFIY01000004.1_cds_WP_155863293.1_1251 target sequence
LDKSKAREFMLERKREKKLSWEEIGKAIGRSPVYAAMLLYGYGQATEEEAEKLVKLLELPLEYKDILMEVPMRTPAQPWPPTDPF

SEQ ID NO: 42014 - protein, 84 aa, unidentified
  REGION 1..84: note = Description of Unknown:cds_NZ_WFIY01000004.1_cds_WP_155863293.1_1251 target sequence
DILMEVPMRTPAQPWPPTDPFIYRLYEAVLLYGPVIKDVAHEMFGDGIMSMIDVMIDVDKTKDEKGNERMILKFNGKWLKYAKW

SEQ ID NO: 42015 - protein, 85 aa, unidentified
  REGION 1..85: note = Description of Unknown:cds_NZ_WFIY01000004.1_cds_WP_155863293.1_1251 target sequence
IGRSPVYAAMLLYGYGQATEEEAEKLVKLLELPLEYKDILMEVPMRTPAQPWPPTDPFIYRLYEAVLLYGPVIKDVAHEMFGDGI

SEQ ID NO: 42016 - protein, 85 aa, unidentified
  REGION 1..85: note = Description of Unknown:cds_NZ_WFIY01000004.1_cds_WP_155863739.1_1609 target sequence
KMNLERLRKGTLKLLILEALNDKPMHAYEIIKSIEKKFHGIYKPSPGSLYPVLKQLIENGMITVEEKDDKKIYIITDKGKEAFNK

SEQ ID NO: 42017 - protein, 84 aa, unidentified
  REGION 1..84: note = Description of Unknown:cds_NZ_WFIY01000004.1_cds_WP_155863739.1_1609 target sequence
EEKDDKKIYIITDKGKEAFNKMKTEMKNVFTKNNQYRKLVNQLFEIGLIIYNFRDKLSEEDYEKINNIINGCKNEIEDLLNKLK

SEQ ID NO: 42018 - protein, 85 aa, unidentified
  REGION 1..85: note = Description of Unknown:cds_NZ_WFIY01000004.1_cds_WP_155863739.1_1609 target sequence
YEIIKSIEKKFHGIYKPSPGSLYPVLKQLIENGMITVEEKDDKKIYIITDKGKEAFNKMKTEMKNVFTKNNQYRKLVNQLFEIGL

SEQ ID NO: 42019 - protein, 28 aa, unidentified
  REGION 1..28: note = Description of Unknown:cds_NZ_WFIY01000004.1_cds_2084 target sequence
ARRKKNPIRATVSMKIGLSNTLLALVNN

SEQ ID NO: 42020 - protein, 84 aa, unidentified
  REGION 1..84: note = Description of Unknown:cds_NZ_WFIY01000004.1_cds_2084 target sequence
KKEYNLPSKVAEDCYRDALATYKSWYNNSRKGRFPRVYKPTVWLTPKASYSVDLEKMTVKIASVGELPILGVMRTIVTLLQSRI

SEQ ID NO: 42021 - protein, 83 aa, unidentified
  REGION 1..83: note = Description of Unknown:cds_NZ_WFIY01000004.1_cds_2084 target sequence
VKALRFTLFWLKENIQNLEEKNTLSKVHEGLYEKLKKEYNLPSKVAEDCYRDALATYKSWYNNSRKGRFPRVYKPTVWLTPKA

SEQ ID NO: 42022 - protein, 85 aa, unidentified
  REGION 1..85: note = Description of Unknown:cds_NC_035460.1_cds_YP_009408033.1_82 target sequence
DDKLKTLAQTFFSGELSTTDIMVLIIELKSIQPIDTIFSLDCTNTFVIDYLYENNVLASNYINSKFKIINQSEYSKYSAMIAKEL

SEQ ID NO: 42023 - protein, 84 aa, unidentified
  REGION 1..84: note = Description of Unknown:cds_NC_035460.1_cds_YP_009408033.1_82 target sequence
KFKIINQSEYSKYSAMIAKELTTYDIICEDIKDYINKNPKLKRVIKMYKCNSKNNNNKINKASKKLKIAIKKGIDYDYIKNAYI

SEQ ID NO: 42024 - protein, 85 aa, unidentified
  REGION 1..85: note = Description of Unknown:cds_NC_035460.1_cds_YP_009408033.1_82 target sequence
LKSIQPIDTIFSLDCTNTFVIDYLYENNVLASNYINSKFKIINQSEYSKYSAMIAKELTTYDIICEDIKDYINKNPKLKRVIKMY

SEQ ID NO: 42025 - protein, 85 aa, unidentified
  REGION 1..85: note = Description of Unknown:cds_NC_029316.1_cds_YP_009230270.1_17 target sequence
GKFDKELIDMVKKLIQKSSSSPYTKVGLSISDEHRLQKIDPELYKQYYDTKMMIEKNRAEFKESILKLIDDINNGILDKYGARAI

SEQ ID NO: 42026 - protein, 84 aa, unidentified
  REGION 1..84: note = Description of Unknown:cds_NC_029316.1_cds_YP_009230270.1_17 target sequence
ILKLIDDINNGILDKYGARAILDRFDENAINHPGYYCISIKMKRLPREQFTELVNKLKQIGFKFNGYNWEYCDIIGNYPRLRKS

SEQ ID NO: 42027 - protein, 85 aa, unidentified
  REGION 1..85: note = Description of Unknown:cds_NC_029316.1_cds_YP_009230270.1_17 target sequence
LSISDEHRLQKIDPELYKQYYDTKMMIEKNRAEFKESILKLIDDINNGILDKYGARAILDRFDENAINHPGYYCISIKMKRLPRE

SEQ ID NO: 42028 - protein, 85 aa, unidentified
  REGION 1..85: note = Description of Unknown:cds_NZ_WFIY01000004.1_cds_WP_155862579.1_352 target sequence
LDEILNKEISSETPIEILISDVQKISQTLAKIRISYDDEVHKNEIKVYEELAESLFEVRLGKYLEDNHKGKGFDEFVFNILDKIK

SEQ ID NO: 42029 - protein, 84 aa, unidentified
  REGION 1..84: note = Description of Unknown:cds_NZ_WFIY01000004.1_cds_WP_155862579.1_352 target sequence
LEDNHKGKGFDEFVFNILDKIKELYISLLSGNLIFNDGKILCKVIKDTIINSMELKKGDLIFLDLQKALALWTAEYITPCKIVS

SEQ ID NO: 42030 - protein, 85 aa, unidentified
  REGION 1..85: note = Description of Unknown:cds_NZ_WFIY01000004.1_cds_WP_155862579.1_352 target sequence
TLAKIRISYDDEVHKNEIKVYEELAESLFEVRLGKYLEDNHKGKGFDEFVFNILDKIKELYISLLSGNLIFNDGKILCKVIKDTI

SEQ ID NO: 42031 - protein, 85 aa, unidentified
  REGION 1..85: note = Description of Unknown:cds_NZ_WFIY01000004.1_cds_WP_155863012.1_892 target sequence
VKVNFDGLCEPINPGGIATYAYVIKIDNQVLQGYGLAEKPWSKDSTNNVAEYMGAYCAIRKLIQLGITKAIFYGDSQLVIRQLSG

SEQ ID NO: 42032 - protein, 84 aa, unidentified
  REGION 1..84: note = Description of Unknown:cds_NZ_WFIY01000004.1_cds_WP_155863012.1_892 target sequence
QLGITKAIFYGDSQLVIRQLSGEYRIKSPRLKRIYDKIQDSLKNFEHIEFKWIPREENTEADRLTRIAYKLVLENKLKEIGCRL

SEQ ID NO: 42033 - protein, 85 aa, unidentified
  REGION 1..85: note = Description of Unknown:cds_NZ_WFIY01000004.1_cds_WP_155863012.1_892 target sequence
NQVLQGYGLAEKPWSKDSTNNVAEYMGAYCAIRKLIQLGITKAIFYGDSQLVIRQLSGEYRIKSPRLKRIYDKIQDSLKNFEHIE

SEQ ID NO: 42034 - protein, 85 aa, unidentified
  REGION 1..85: note = Description of Unknown:cds_NZ_WFIY01000004.1_cds_WP_155863161.1_1090 target sequence
QVKSSFKNEEFIPVKYTCDGEDISPPLEWDKVDNAKTYAIIVEDPDAPAGTFIHWVIYNIKGNSLPENVPKKEKSEYGIQGINDF

SEQ ID NO: 42035 - protein, 84 aa, unidentified
  REGION 1..84: note = Description of Unknown:cds_NZ_WFIY01000004.1_cds_WP_155863161.1_1090 target sequence
SLPENVPKKEKSEYGIQGINDFELIGYNGPCPPRTHGAHRYYFNVYALDTELDYKSKITADELKEMMEGHILATGSIMGKYKRK

SEQ ID NO: 42036 - protein, 85 aa, unidentified
  REGION 1..85: note = Description of Unknown:cds_NZ_WFIY01000004.1_cds_WP_155863161.1_1090 target sequence
EWDKVDNAKTYAIIVEDPDAPAGTFIHWVIYNIKGNSLPENVPKKEKSEYGIQGINDFELIGYNGPCPPRTHGAHRYYFNVYALD

SEQ ID NO: 42037 - protein, 85 aa, unidentified
  REGION 1..85: note = Description of Unknown:cds_NZ_WFIY01000004.1_cds_WP_155863418.1_1400 target sequence
HEWSVADAVIRTVIDWADGKKIKVKKVVLGVPSFSFLDVEILKEAFDMMKKDSVLDEAELEVKFKDPKFKCKNCGKEFSLNEVKD

SEQ ID NO: 42038 - protein, 84 aa, unidentified
  REGION 1..84: note = Description of Unknown:cds_NZ_WFIY01000004.1_cds_WP_155863418.1_1400 target sequence
FKDPKFKCKNCGKEFSLNEVKDQIDSVKSEFGEEYPMHFMPALAPSFIKCPYCGSHDIILESQDMTIDEIQVEENGTVKTVSQG

SEQ ID NO: 42039 - protein, 85 aa, unidentified
  REGION 1..85: note = Description of Unknown:cds_NZ_WFIY01000004.1_cds_WP_155863418.1_1400 target sequence
VLGVPSFSFLDVEILKEAFDMMKKDSVLDEAELEVKFKDPKFKCKNCGKEFSLNEVKDQIDSVKSEFGEEYPMHFMPALAPSFIK

SEQ ID NO: 42040 - protein, 85 aa, unidentified
  REGION 1..85: note = Description of Unknown:cds_NZ_WFIY01000004.1_cds_WP_155864179.1_2137 target sequence
ELGRKYKLFAFLNLSISVTVITIASVDTHVAFILPPFLATAATKLPDPAWKFQRSLVVISSYLLSATIGIIFALFSSSIFIAVLA

SEQ ID NO: 42041 - protein, 84 aa, unidentified
  REGION 1..84: note = Description of Unknown:cds_NZ_WFIY01000004.1_cds_WP_155864179.1_2137 target sequence
LSATIGIIFALFSSSIFIAVLASIIAYGIELILNIEHPPSILATFLGVLERVSPIYILHPVLVGVLTIEGINYVISRIMKVSKK

SEQ ID NO: 42042 - protein, 85 aa, unidentified
  REGION 1..85: note = Description of Unknown:cds_NZ_WFIY01000004.1_cds_WP_155864179.1_2137 target sequence
THVAFILPPFLATAATKLPDPAWKFQRSLVVISSYLLSATIGIIFALFSSSIFIAVLASIIAYGIELILNIEHPPSILATFLGVL

SEQ ID NO: 42043 - protein, 85 aa, unidentified
  REGION 1..85: note = Description of Unknown:cds_NZ_WFIY01000004.1_cds_WP_155864254.1_2245 target sequence
LKERLGKIEVEVKGEIEINGETYKIAEVPSADEYKGFPPSWEFVKNSMLSWKPYFKGKMVEINGQLIPAVGNYLLNMDEEMYELT

SEQ ID NO: 42044 - protein, 84 aa, unidentified
  REGION 1..84: note = Description of Unknown:cds_NZ_WFIY01000004.1_cds_WP_155864254.1_2245 target sequence
QLIPAVGNYLLNMDEEMYELTLRVYQAFKLNKPLLETNISVIVTDQINEVERKIGRALNSEEKTAYYIRYAVELAILRDIGLIN

SEQ ID NO: 42045 - protein, 85 aa, unidentified
  REGION 1..85: note = Description of Unknown:cds_NZ_WFIY01000004.1_cds_WP_155864254.1_2245 target sequence
VPSADEYKGFPPSWEFVKNSMLSWKPYFKGKMVEINGQLIPAVGNYLLNMDEEMYELTLRVYQAFKLNKPLLETNISVIVTDQIN

SEQ ID NO: 42046 - protein, 85 aa, unidentified
  REGION 1..85: note = Description of Unknown:cds_NZ_WFIY01000004.1_cds_WP_155864256.1_2247 target sequence
LVVESNCEIPENLLYYIEGKNTVWAKQESADVVLVGITDIAQTMAGKIVKVRIKKKGIKVERGRPLATMESGKWAGPVPAPVSGE

SEQ ID NO: 42047 - protein, 84 aa, unidentified
  REGION 1..84: note = Description of Unknown:cds_NZ_WFIY01000004.1_cds_WP_155864256.1_2247 target sequence
PLATMESGKWAGPVPAPVSGEIIEVNAEAEKDPVIINRDPYGKGWLVRMKVTNPEELKQLYTGEQAIQKLKELIASEKISCKRL

SEQ ID NO: 42048 - protein, 85 aa, unidentified
  REGION 1..85: note = Description of Unknown:cds_NZ_WFIY01000004.1_cds_WP_155864256.1_2247 target sequence
ESADVVLVGITDIAQTMAGKIVKVRIKKKGIKVERGRPLATMESGKWAGPVPAPVSGEIIEVNAEAEKDPVIINRDPYGKGWLVR

SEQ ID NO: 42049 - protein, 85 aa, unidentified
  REGION 1..85: note = Description of Unknown:cds_NC_035460.1_cds_YP_009407983.1_32 target sequence
EITKLDEILKLQPFKNMNKIKINLDDNCILGNRCFVKIDNVRYIPNNSISTNKNVFIRGHKFSLMELLYSPFHFQQSQVQYLLPS

SEQ ID NO: 42050 - protein, 84 aa, unidentified
  REGION 1..84: note = Description of Unknown:cds_NC_035460.1_cds_YP_009407983.1_32 target sequence
LMELLYSPFHFQQSQVQYLLPSFVLNCIDEAKKKNITCKYCITEKNNNSNGLSINIFIPTILISVYIIIGLRIKDFWSSKFEIE

SEQ ID NO: 42051 - protein, 85 aa, unidentified
  REGION 1..85: note = Description of Unknown:cds_NC_035460.1_cds_YP_009407983.1_32 target sequence
CILGNRCFVKIDNVRYIPNNSISTNKNVFIRGHKFSLMELLYSPFHFQQSQVQYLLPSFVLNCIDEAKKKNITCKYCITEKNNNS

SEQ ID NO: 42052 - protein, 85 aa, unidentified
  REGION 1..85: note = Description of Unknown:cds_NC_035460.1_cds_YP_009408020.1_69 target sequence
DHDKYLLTMFFANDKSFFKYLSEQDDEIAMMDVSCIIEHLNFLLMLLIKSKEKLEAIGHCYEPLSEDFKSVMDFSSMTEMKQLLN

SEQ ID NO: 42053 - protein, 84 aa, unidentified
  REGION 1..84: note = Description of Unknown:cds_NC_035460.1_cds_YP_009408020.1_69 target sequence
LSEDFKSVMDFSSMTEMKQLLNKTPINVNDVSVKVDKGYLLDFVISMIRLKNSVDYKTPKHVTYIDPRHNQLLSNILKIINKSE

SEQ ID NO: 42054 - protein, 85 aa, unidentified
  REGION 1..85: note = Description of Unknown:cds_NC_035460.1_cds_YP_009408020.1_69 target sequence
IAMMDVSCIIEHLNFLLMLLIKSKEKLEAIGHCYEPLSEDFKSVMDFSSMTEMKQLLNKTPINVNDVSVKVDKGYLLDFVISMIR

SEQ ID NO: 42055 - protein, 85 aa, unidentified
  REGION 1..85: note = Description of Unknown:cds_NC_010495.1_cds_YP_001742038.1_1 target sequence
ANPNPVMKFSSEYQPAGRGISYRNRLIEALKRCGLGEEEFLDAFIRTSIRMTEENPTQGVQMLKEIFLRISPVQKSMAPPVNFKY

SEQ ID NO: 42056 - protein, 84 aa, unidentified
  REGION 1..84: note = Description of Unknown:cds_NC_010495.1_cds_YP_001742038.1_1 target sequence
KEIFLRISPVQKSMAPPVNFKYRKDATPVEQIEDVIQSVSSGELPIDVASQVVSMIKVGLDVKELTELAARLERLEKLLEQQNA

SEQ ID NO: 42057 - protein, 85 aa, unidentified
  REGION 1..85: note = Description of Unknown:cds_NC_010495.1_cds_YP_001742038.1_1 target sequence
EALKRCGLGEEEFLDAFIRTSIRMTEENPTQGVQMLKEIFLRISPVQKSMAPPVNFKYRKDATPVEQIEDVIQSVSSGELPIDVA

SEQ ID NO: 42058 - protein, 85 aa, unidentified
  REGION 1..85: note = Description of Unknown:cds_NZ_WFIY01000004.1_cds_WP_155862542.1_310 target sequence
SDQQENKVVISLDDLLAQAQLLKKQIDDLSAARAEILDSVASIEAAKASIQELKTQQEMLVSSDKKGYLMFKINNQPPQKVLVYL

SEQ ID NO: 42059 - protein, 84 aa, unidentified
  REGION 1..84: note = Description of Unknown:cds_NZ_WFIY01000004.1_cds_WP_155862542.1_310 target sequence
SDKKGYLMFKINNQPPQKVLVYLGLSYYVEVDMDTALKILDDRENELKEASAGLDKKLAESKAAYDQIIDILNQIQAQAQQKGE

SEQ ID NO: 42060 - protein, 85 aa, unidentified
  REGION 1..85: note = Description of Unknown:cds_NZ_WFIY01000004.1_cds_WP_155862542.1_310 target sequence
DLSAARAEILDSVASIEAAKASIQELKTQQEMLVSSDKKGYLMFKINNQPPQKVLVYLGLSYYVEVDMDTALKILDDRENELKEA

SEQ ID NO: 42061 - protein, 85 aa, unidentified
  REGION 1..85: note = Description of Unknown:cds_NZ_WFIY01000004.1_cds_WP_155862861.1_699 target sequence
IEIRTHSALHVLKGATRKVLGAKWTASTYVNGPHGRLTVQFERKPTEEEINRIFVEAQNKINEGVPFITEKLSREEAEKKYGDEI

SEQ ID NO: 42062 - protein, 84 aa, unidentified
  REGION 1..84: note = Description of Unknown:cds_NZ_WFIY01000004.1_cds_WP_155862861.1_699 target sequence
EGVPFITEKLSREEAEKKYGDEIYDLFPVPQEVKELYIVIIPGWNINACNKQHVNNTKEIGEIKLDHWRYRNAKKLLELSFNVI

SEQ ID NO: 42063 - protein, 85 aa, unidentified
  REGION 1..85: note = Description of Unknown:cds_NZ_WFIY01000004.1_cds_WP_155862861.1_699 target sequence
TYVNGPHGRLTVQFERKPTEEEINRIFVEAQNKINEGVPFITEKLSREEAEKKYGDEIYDLFPVPQEVKELYIVIIPGWNINACN

SEQ ID NO: 42064 - protein, 85 aa, unidentified
  REGION 1..85: note = Description of Unknown:cds_NZ_WFIY01000004.1_cds_WP_155862890.1_735 target sequence
EIYLFYIILLSFFSNFVVYLFYKYYISKKLNYIIIKLKEYDERLGKIVSDKRKEKVQKKIQNEIKSYNSTMYFYSFMQTALLIFI

SEQ ID NO: 42065 - protein, 84 aa, unidentified
  REGION 1..84: note = Description of Unknown:cds_NZ_WFIY01000004.1_cds_WP_155862890.1_735 target sequence
EIKSYNSTMYFYSFMQTALLIFIYFIDLSLVVFRMNFNVCLPYYIPLISIQYNGKYIIPYSSFIIFILSFVLFTPISLRRPKII

SEQ ID NO: 42066 - protein, 85 aa, unidentified
  REGION 1..85: note = Description of Unknown:cds_NZ_WFIY01000004.1_cds_WP_155862890.1_735 target sequence
KKLNYIIIKLKEYDERLGKIVSDKRKEKVQKKIQNEIKSYNSTMYFYSFMQTALLIFIYFIDLSLVVFRMNFNVCLPYYIPLISI

SEQ ID NO: 42067 - protein, 85 aa, unidentified
  REGION 1..85: note = Description of Unknown:cds_NZ_WFIY01000004.1_cds_WP_205737142.1_1376 target sequence
IKTNVMNIKVTSKSVSETKSEIKVRHFTLVVDEPEYFSGTDSGPNPLEYLLTALAGCISITLQLVAREKGIKIRNVSLEITGTLD

SEQ ID NO: 42068 - protein, 84 aa, unidentified
  REGION 1..84: note = Description of Unknown:cds_NZ_WFIY01000004.1_cds_WP_205737142.1_1376 target sequence
QLVAREKGIKIRNVSLEITGTLDTDKFLGKDMNKRAALNKIKVNLSVDADAPKEVIEKLVEETETRCPVTDTLKNGTTVEINLR

SEQ ID NO: 42069 - protein, 85 aa, unidentified
  REGION 1..85: note = Description of Unknown:cds_NZ_WFIY01000004.1_cds_WP_205737142.1_1376 target sequence
TLVVDEPEYFSGTDSGPNPLEYLLTALAGCISITLQLVAREKGIKIRNVSLEITGTLDTDKFLGKDMNKRAALNKIKVNLSVDAD

SEQ ID NO: 42070 - protein, 85 aa, unidentified
  REGION 1..85: note = Description of Unknown:cds_NZ_WFIY01000004.1_cds_WP_155863829.1_1722 target sequence
LDVGQEAPDFEAESTLGKIKLSDYKGKKKVILYFYPKAFTAGCTRELQRFVQLYDEIVKLNAEVIGVSADSLSSVKKFAEKYGAK

SEQ ID NO: 42071 - protein, 84 aa, unidentified
  REGION 1..84: note = Description of Unknown:cds_NZ_WFIY01000004.1_cds_WP_155863829.1_1722 target sequence
EVIGVSADSLSSVKKFAEKYGAKFPLIGDKEKKIINSYGVLNEKGTSAQRVTFVIDENGKITHVFKNLKKAEEHADKALEAIKS

SEQ ID NO: 42072 - protein, 85 aa, unidentified
  REGION 1..85: note = Description of Unknown:cds_NZ_WFIY01000004.1_cds_WP_155863829.1_1722 target sequence
KKVILYFYPKAFTAGCTRELQRFVQLYDEIVKLNAEVIGVSADSLSSVKKFAEKYGAKFPLIGDKEKKIINSYGVLNEKGTSAQR

SEQ ID NO: 42073 - protein, 85 aa, unidentified
  REGION 1..85: note = Description of Unknown:cds_NC_035460.1_cds_YP_009408035.1_84 target sequence
DLNFKKITNLLQTENVIFPHEIDQLLNEKYIIIERSNDNKIIALHIYNNIARFDNNTIFQIIKYIYKNNTNVINALFPNKNFYLN

SEQ ID NO: 42074 - protein, 84 aa, unidentified
  REGION 1..84: note = Description of Unknown:cds_NC_035460.1_cds_YP_009408035.1_84 target sequence
KYIYKNNTNVINALFPNKNFYLNLNELCPIKTITLYSNTIHNNEIINPITILIDIFNSFNYGIKNKKLPYYYSSFRKYINNIIT

SEQ ID NO: 42075 - protein, 85 aa, unidentified
  REGION 1..85: note = Description of Unknown:cds_NC_035460.1_cds_YP_009408035.1_84 target sequence
EKYIIIERSNDNKIIALHIYNNIARFDNNTIFQIIKYIYKNNTNVINALFPNKNFYLNLNELCPIKTITLYSNTIHNNEIINPIT

SEQ ID NO: 42076 - protein, 85 aa, unidentified
  REGION 1..85: note = Description of Unknown:cds_NC_009884.1_cds_YP_001496964.1_39 target sequence
SNSIDQNTMRTILLNSVQGGDVDANGNLIAKVSLMKLFQQFGSDITFSRITLDGDTINLYILSTINWQPIDVGNGITLDLRQYAG

SEQ ID NO: 42077 - protein, 84 aa, unidentified
  REGION 1..84: note = Description of Unknown:cds_NC_009884.1_cds_YP_001496964.1_39 target sequence
STINWQPIDVGNGITLDLRQYAGTTVIKIPIKKKFLDDLTQIANLPIVGVEQVNVNNTTDVVIKINTGKKMTATTSSSPPTIDF

SEQ ID NO: 42078 - protein, 85 aa, unidentified
  REGION 1..85: note = Description of Unknown:cds_NC_009884.1_cds_YP_001496964.1_39 target sequence
LIAKVSLMKLFQQFGSDITFSRITLDGDTINLYILSTINWQPIDVGNGITLDLRQYAGTTVIKIPIKKKFLDDLTQIANLPIVGV

SEQ ID NO: 42079 - protein, 85 aa, unidentified
  REGION 1..85: note = Description of Unknown:cds_NC_007409.1_cds_YP_319878.1_47 target sequence
LYFVGRIYGYEVVNYTNNILIIRKNKGSSVPKQFVGIYELIEEHDEYMKLRREMDLSNALINVKGKIITAKNSTITRASMFNPFD

SEQ ID NO: 42080 - protein, 84 aa, unidentified
  REGION 1..84: note = Description of Unknown:cds_NC_007409.1_cds_YP_319878.1_47 target sequence
VKGKIITAKNSTITRASMFNPFDTLIVEKRRNLRGVKKTIVIKKGITAILKQQQNTMIIRIAKSLHNKKPIPLAPDTDWFEIIS

SEQ ID NO: 42081 - protein, 85 aa, unidentified
  REGION 1..85: note = Description of Unknown:cds_NC_007409.1_cds_YP_319878.1_47 target sequence
SSVPKQFVGIYELIEEHDEYMKLRREMDLSNALINVKGKIITAKNSTITRASMFNPFDTLIVEKRRNLRGVKKTIVIKKGITAIL

SEQ ID NO: 42082 - protein, 85 aa, unidentified
  REGION 1..85: note = Description of Unknown:cds_NC_038931.1_cds_YP_009509136.1_20 target sequence
ITSNITTNAINQVDPKAVQTGLKIFRILKKIREGQVDVNEIDSLPFAKEFYIKTGRSLGKLIQDMMGSDPDKALELFLGAFMRGE

SEQ ID NO: 42083 - protein, 84 aa, unidentified
  REGION 1..84: note = Description of Unknown:cds_NC_038931.1_cds_YP_009509136.1_20 target sequence
IQDMMGSDPDKALELFLGAFMRGEELNKAIQFHKELIAELSKEDGADLCTKVNRVLEKYGSRIDCENAEMSVEMAERLVREIIE

SEQ ID NO: 42084 - protein, 85 aa, unidentified
  REGION 1..85: note = Description of Unknown:cds_NC_038931.1_cds_YP_009509136.1_20 target sequence
LKKIREGQVDVNEIDSLPFAKEFYIKTGRSLGKLIQDMMGSDPDKALELFLGAFMRGEELNKAIQFHKELIAELSKEDGADLCTK

SEQ ID NO: 42085 - protein, 85 aa, unidentified
  REGION 1..85: note = Description of Unknown:cds_NZ_WFIY01000004.1_cds_WP_155862703.1_503 target sequence
GKRHILLYPPTIEVKNLHNINIVDIRRCKYTEIDIIDDPQKVIKILGNPIKIINVNEEKESFPDLFFTCRFWEAHEVLEKIWINE

SEQ ID NO: 42086 - protein, 84 aa, unidentified
  REGION 1..84: note = Description of Unknown:cds_NZ_WFIY01000004.1_cds_WP_155862703.1_503 target sequence
FPDLFFTCRFWEAHEVLEKIWINEGDEKRKKYLQALIFLCASMIHYLKGHEKVSDDLLNKALSLISELPEDLLPLFYISIALDS

SEQ ID NO: 42087 - protein, 85 aa, unidentified
  REGION 1..85: note = Description of Unknown:cds_NZ_WFIY01000004.1_cds_WP_155862703.1_503 target sequence
CKYTEIDIIDDPQKVIKILGNPIKIINVNEEKESFPDLFFTCRFWEAHEVLEKIWINEGDEKRKKYLQALIFLCASMIHYLKGHE

SEQ ID NO: 42088 - protein, 85 aa, unidentified
  REGION 1..85: note = Description of Unknown:cds_NZ_WFIY01000004.1_cds_WP_048054564.1_803 target sequence
SISRRVVYDINSLIDKTVIIKLTNGKTYTGQLSSFEIDPFMVSISNAKDNENNVYYKAIINGSIISEILIKNAPIFDVKEFASLI

SEQ ID NO: 42089 - protein, 84 aa, unidentified
  REGION 1..84: note = Description of Unknown:cds_NZ_WFIY01000004.1_cds_WP_048054564.1_803 target sequence
GSIISEILIKNAPIFDVKEFASLIEKSLNLRPGDIKVYEEAGVITVLEKIKVTENGVEGSGPLAQRIYDLFNEYVEKKKRETSR

SEQ ID NO: 42090 - protein, 85 aa, unidentified
  REGION 1..85: note = Description of Unknown:cds_NZ_WFIY01000004.1_cds_WP_048054564.1_803 target sequence
YTGQLSSFEIDPFMVSISNAKDNENNVYYKAIINGSIISEILIKNAPIFDVKEFASLIEKSLNLRPGDIKVYEEAGVITVLEKIK

SEQ ID NO: 42091 - protein, 85 aa, unidentified
  REGION 1..85: note = Description of Unknown:cds_NZ_WFIY01000004.1_cds_WP_013775545.1_865 target sequence
SGKSPKGLYAARKLKLKRLKFRWSQRSFKARMLQLKKRFDPLEGAPMARGIVLEKVGIESRQPNSAVRKCVRVQLVKNGRVVTAF

SEQ ID NO: 42092 - protein, 84 aa, unidentified
  REGION 1..84: note = Description of Unknown:cds_NZ_WFIY01000004.1_cds_WP_013775545.1_865 target sequence
QPNSAVRKCVRVQLVKNGRVVTAFVPGDGGVNFIDEHDEVVIAGIGGTLGRSMGDLPGVRYKVIMVNGVSLDALYKGKKQKPVR

SEQ ID NO: 42093 - protein, 85 aa, unidentified
  REGION 1..85: note = Description of Unknown:cds_NZ_WFIY01000004.1_cds_WP_013775545.1_865 target sequence
FKARMLQLKKRFDPLEGAPMARGIVLEKVGIESRQPNSAVRKCVRVQLVKNGRVVTAFVPGDGGVNFIDEHDEVVIAGIGGTLGR

SEQ ID NO: 42094 - protein, 85 aa, unidentified
  REGION 1..85: note = Description of Unknown:cds_NZ_WFIY01000004.1_cds_WP_155863874.1_1778 target sequence
KVKIKSILNVIGHEELYVIPIACNGKYVLGLNFFEDVEGGRVARFVLIMDRYGEINSIKVVEGDKGIVIAEGVRDDMDAISKVIK

SEQ ID NO: 42095 - protein, 84 aa, unidentified
  REGION 1..84: note = Description of Unknown:cds_NZ_WFIY01000004.1_cds_WP_155863874.1_1778 target sequence
EGDKGIVIAEGVRDDMDAISKVIKIDRKMVTNRIPLFINIKVKSSPETQDRGIRGYENYIKRYGEIDPSKLKGIIKLDVIEEVV

SEQ ID NO: 42096 - protein, 85 aa, unidentified
  REGION 1..85: note = Description of Unknown:cds_NZ_WFIY01000004.1_cds_WP_155863874.1_1778 target sequence
VLGLNFFEDVEGGRVARFVLIMDRYGEINSIKVVEGDKGIVIAEGVRDDMDAISKVIKIDRKMVTNRIPLFINIKVKSSPETQDR

SEQ ID NO: 42097 - protein, 85 aa, unidentified
  REGION 1..85: note = Description of Unknown:cds_NC_030656.1_cds_YP_009268739.1_24 target sequence
EVSTLEDIIALKPFYSMSKTKRNEEQNCIMGNRCFVKVSSVRHIPSRSIDATAPIFLRNQKFYLEDLLFSPFHFSRMQYQYLSPG

SEQ ID NO: 42098 - protein, 84 aa, unidentified
  REGION 1..84: note = Description of Unknown:cds_NC_030656.1_cds_YP_009268739.1_24 target sequence
FYLEDLLFSPFHFSRMQYQYLSPGFVMKCINRAKPKKTVFCVTEKTLNDNKLSIDVFVPTTDPTKYLIIGLRVVDFWKSKFEII

SEQ ID NO: 42099 - protein, 85 aa, unidentified
  REGION 1..85: note = Description of Unknown:cds_NC_030656.1_cds_YP_009268739.1_24 target sequence
CIMGNRCFVKVSSVRHIPSRSIDATAPIFLRNQKFYLEDLLFSPFHFSRMQYQYLSPGFVMKCINRAKPKKTVFCVTEKTLNDNK

SEQ ID NO: 42100 - protein, 85 aa, unidentified
  REGION 1..85: note = Description of Unknown:cds_NC_005830.1_cds_YP_003752.1_27 target sequence
LLEEFRLYRNERTQRLMLTKTEFAEVKYKTVELPVGDSVRTGQEVFLNGAWYKVETVRGKKAKLRPLENGNWKLIATGIEAVKQY

SEQ ID NO: 42101 - protein, 84 aa, unidentified
  REGION 1..84: note = Description of Unknown:cds_NC_005830.1_cds_YP_003752.1_27 target sequence
KLRPLENGNWKLIATGIEAVKQYLNVLTETEVAVEENRLIVKMKRPPMVAVDKGTSYTFNEAFMLLYNYCMENKIDLILEFINS

SEQ ID NO: 42102 - protein, 85 aa, unidentified
  REGION 1..85: note = Description of Unknown:cds_NC_005830.1_cds_YP_003752.1_27 target sequence
YKTVELPVGDSVRTGQEVFLNGAWYKVETVRGKKAKLRPLENGNWKLIATGIEAVKQYLNVLTETEVAVEENRLIVKMKRPPMVA

SEQ ID NO: 42103 - protein, 85 aa, unidentified
  REGION 1..85: note = Description of Unknown:cds_NC_009884.1_cds_YP_001496971.1_46 target sequence
LTPAVQNSYIAFLISSNHHDPNLFLLLQNHASIRVMVRRRDIALTTVNEDDVEYEYEHLHSTLLSQIFGIADAVYPNPSRHLLID

SEQ ID NO: 42104 - protein, 84 aa, unidentified
  REGION 1..84: note = Description of Unknown:cds_NC_009884.1_cds_YP_001496971.1_46 target sequence
LLSQIFGIADAVYPNPSRHLLIDMLKYSGYDNVDDWISDFCSSLPRNVARRSSYLCLHHGHASKWHNNKNVLVYLVTVVVNKIV

SEQ ID NO: 42105 - protein, 85 aa, unidentified
  REGION 1..85: note = Description of Unknown:cds_NC_009884.1_cds_YP_001496971.1_46 target sequence
QNHASIRVMVRRRDIALTTVNEDDVEYEYEHLHSTLLSQIFGIADAVYPNPSRHLLIDMLKYSGYDNVDDWISDFCSSLPRNVAR

SEQ ID NO: 42106 - protein, 85 aa, unidentified
  REGION 1..85: note = Description of Unknown:cds_NC_010495.1_cds_YP_001742059.1_22 target sequence
FGADIAIMIMYVLGFACAGMVAFLVFIPAMAMSVYLGWVLVDSFPAEYLYYLAQSMVWLFPAIALRKSTKMALCVLTMSLYEWLV

SEQ ID NO: 42107 - protein, 84 aa, unidentified
  REGION 1..84: note = Description of Unknown:cds_NC_010495.1_cds_YP_001742059.1_22 target sequence
AIALRKSTKMALCVLTMSLYEWLVAIESFVWEFITPVETPLHAQYAFIIIGIHLFILSITFKWGGEIGHYSWRGCHRFFADSNL

SEQ ID NO: 42108 - protein, 85 aa, unidentified
  REGION 1..85: note = Description of Unknown:cds_NC_010495.1_cds_YP_001742059.1_22 target sequence
PAMAMSVYLGWVLVDSFPAEYLYYLAQSMVWLFPAIALRKSTKMALCVLTMSLYEWLVAIESFVWEFITPVETPLHAQYAFIIIG

SEQ ID NO: 42109 - protein, 85 aa, unidentified
  REGION 1..85: note = Description of Unknown:vpeps_3DKD_1 target sequence
YKKAGLQRTLVLIKPDAFERSLVAEIMGRIEKKNFKIVSMKFWSKAPRNLIEQHYKEHSEQSYFNDLCDFMVSGPIISIVYEGTD

SEQ ID NO: 42110 - protein, 85 aa, unidentified
  REGION 1..85: note = Description of Unknown:vpeps_3DKD_1 target sequence
SYFNDLCDFMVSGPIISIVYEGTDAISKIRRLQGNTNPLASAPGTIRGDLANDIGENLIHASDSEDSAVDEISIWFPETKMETDN

SEQ ID NO: 42111 - protein, 85 aa, unidentified
  REGION 1..85: note = Description of Unknown:vpeps_3DKD_1 target sequence
GRIEKKNFKIVSMKFWSKAPRNLIEQHYKEHSEQSYFNDLCDFMVSGPIISIVYEGTDAISKIRRLQGNTNPLASAPGTIRGDLA

SEQ ID NO: 42112 - protein, 85 aa, unidentified
  REGION 1..85: note = Description of Unknown:vpeps_3G2X_1 target sequence
SYFNDLCDFMVSGPIISIVYEGTDAISKIRRLQGNTNPLASAPGTIRGDLANDIRENLIHASDSEDSAVDEISIWFPETKMETDN

SEQ ID NO: 42113 - protein, 85 aa, unidentified
  REGION 1..85: note = Description of Unknown:vpeps_3EVO_1 target sequence
YKKAGLQRTLVLIKPDAFERSLVAEIMGRIEKKNFKIVSMKFWSKAPRNLIEQHYKEHSEQSYFNDNCDFMVSGPIISIVYEGTD

SEQ ID NO: 42114 - protein, 85 aa, unidentified
  REGION 1..85: note = Description of Unknown:vpeps_3EVO_1 target sequence
SYFNDNCDFMVSGPIISIVYEGTDAISKIRRLQGNTNPLASAPGTIRGDLANDIRENLIHASDSEDSAVDEISIWFPETKMETDN

SEQ ID NO: 42115 - protein, 85 aa, unidentified
  REGION 1..85: note = Description of Unknown:vpeps_3EVO_1 target sequence
GRIEKKNFKIVSMKFWSKAPRNLIEQHYKEHSEQSYFNDNCDFMVSGPIISIVYEGTDAISKIRRLQGNTNPLASAPGTIRGDLA

SEQ ID NO: 42116 - protein, 85 aa, unidentified
  REGION 1..85: note = Description of Unknown:vpeps_3EMT_1 target sequence
SYFNDNCDFMVSGPIISIVYEGTDAISKIRRLQGNTNPLASAPGTIRGDLANDIGENLIHASDSEDSAVDEISIWFPETKMETDN

SEQ ID NO: 42117 - protein, 85 aa, unidentified
  REGION 1..85: note = Description of Unknown:cds_NZ_WFIY01000004.1_cds_WP_155862403.1_140 target sequence
LSSENLSKLVIKITSITVQILLIIGLIIVLLYTVTQTIESFQISLIDVASIILENSLLIIVFLEVYLSVVDFFHGKGRSVVYVMD

SEQ ID NO: 42118 - protein, 84 aa, unidentified
  REGION 1..84: note = Description of Unknown:cds_NZ_WFIY01000004.1_cds_WP_155862403.1_140 target sequence
FLEVYLSVVDFFHGKGRSVVYVMDATLSFVLREIIIGILTGSVTDIDLLAMSGAIGIIASGRFLLTSRNLRLIRRRKVNKERSK

SEQ ID NO: 42119 - protein, 85 aa, unidentified
  REGION 1..85: note = Description of Unknown:cds_NZ_WFIY01000004.1_cds_WP_155862403.1_140 target sequence
IVLLYTVTQTIESFQISLIDVASIILENSLLIIVFLEVYLSVVDFFHGKGRSVVYVMDATLSFVLREIIIGILTGSVTDIDLLAM

SEQ ID NO: 42120 - protein, 85 aa, unidentified
  REGION 1..85: note = Description of Unknown:cds_NZ_WFIY01000004.1_cds_WP_155862586.1_359 target sequence
TKIVVTAEVRPSEDESKVLTAIANFFDYEKITKEKRGDYIVVIVEESRTLKSLQKFHDALREEKILDVARKYLRKGISDNSISFM

SEQ ID NO: 42121 - protein, 84 aa, unidentified
  REGION 1..84: note = Description of Unknown:cds_NZ_WFIY01000004.1_cds_WP_155862586.1_359 target sequence
REEKILDVARKYLRKGISDNSISFMLHKQAAAIGVISFVDDERESPLGPISFYIEHKNPNEVVDWLAPRTAKGHPLWENKIPED

SEQ ID NO: 42122 - protein, 85 aa, unidentified
  REGION 1..85: note = Description of Unknown:cds_NZ_WFIY01000004.1_cds_WP_155862586.1_359 target sequence
YEKITKEKRGDYIVVIVEESRTLKSLQKFHDALREEKILDVARKYLRKGISDNSISFMLHKQAAAIGVISFVDDERESPLGPISF

SEQ ID NO: 42123 - protein, 85 aa, unidentified
  REGION 1..85: note = Description of Unknown:cds_NZ_WFIY01000004.1_cds_WP_155862803.1_626 target sequence
QEEELKEKIKKMYEDGKTIREIAKELNMSYSKVRKILILEGVEFRGKLKQELVNKIIELAKQGYSANRISKEMRLNSNTVLRILR

SEQ ID NO: 42124 - protein, 84 aa, unidentified
  REGION 1..84: note = Description of Unknown:cds_NZ_WFIY01000004.1_cds_WP_155862803.1_626 target sequence
KQGYSANRISKEMRLNSNTVLRILRKNNLVKTKRKLSKEDIEKIKLMYESGSSIYKIAKELKISTNLVVYHLKKLNIYKPQTYS

SEQ ID NO: 42125 - protein, 85 aa, unidentified
  REGION 1..85: note = Description of Unknown:cds_NZ_WFIY01000004.1_cds_WP_155862803.1_626 target sequence
MSYSKVRKILILEGVEFRGKLKQELVNKIIELAKQGYSANRISKEMRLNSNTVLRILRKNNLVKTKRKLSKEDIEKIKLMYESGS

SEQ ID NO: 42126 - protein, 85 aa, unidentified
  REGION 1..85: note = Description of Unknown:cds_NZ_WFIY01000004.1_cds_WP_155862893.1_738 target sequence
VVRKEKKSRKMRGYRTMGWGSKGQHRNRGAKGGRQVGMHKHKWSWLVKYGKDWYGKHGFVNPTSVKISAISLRDLQTSIENGSIK

SEQ ID NO: 42127 - protein, 84 aa, unidentified
  REGION 1..84: note = Description of Unknown:cds_NZ_WFIY01000004.1_cds_WP_155862893.1_738 target sequence
NPTSVKISAISLRDLQTSIENGSIKIDEKDGKKIVDLTKYGFDKLLGSGNLNISGLNIIVRHATEKAKQKLEKIGGQVILTPNS

SEQ ID NO: 42128 - protein, 85 aa, unidentified
  REGION 1..85: note = Description of Unknown:cds_NZ_WFIY01000004.1_cds_WP_155862893.1_738 target sequence
RGAKGGRQVGMHKHKWSWLVKYGKDWYGKHGFVNPTSVKISAISLRDLQTSIENGSIKIDEKDGKKIVDLTKYGFDKLLGSGNLN

SEQ ID NO: 42129 - protein, 85 aa, unidentified
  REGION 1..85: note = Description of Unknown:cds_NZ_WFIY01000004.1_cds_WP_155862984.1_856 target sequence
VSQLEFVMIKPDGVKRRLIGEIISRFEKRGLNIIAMKMVRISRETAEKLYEEHKGKSFFEDLISYITSGPVVCMVIEGDEAVSVI

SEQ ID NO: 42130 - protein, 84 aa, unidentified
  REGION 1..84: note = Description of Unknown:cds_NZ_WFIY01000004.1_cds_WP_155862984.1_856 target sequence
DLISYITSGPVVCMVIEGDEAVSVIRKMIGATDPKEALPGTIRGDYALSKAENVIHASDSPEKAKKEMSLFFEETELQLNTQTV

SEQ ID NO: 42131 - protein, 85 aa, unidentified
  REGION 1..85: note = Description of Unknown:cds_NZ_WFIY01000004.1_cds_WP_155862984.1_856 target sequence
KRGLNIIAMKMVRISRETAEKLYEEHKGKSFFEDLISYITSGPVVCMVIEGDEAVSVIRKMIGATDPKEALPGTIRGDYALSKAE

SEQ ID NO: 42132 - protein, 85 aa, unidentified
  REGION 1..85: note = Description of Unknown:cds_NZ_WFIY01000004.1_cds_WP_155863186.1_1118 target sequence
IAKDKISSLREELNNLSETNLSIAEQGILQFIKEQIDKEEELVSNFDKSTSENNYDKAVSDFFQLIQRTNLMYAYIMQPSVLSML

SEQ ID NO: 42133 - protein, 84 aa, unidentified
  REGION 1..84: note = Description of Unknown:cds_NZ_WFIY01000004.1_cds_WP_155863186.1_1118 target sequence
DFFQLIQRTNLMYAYIMQPSVLSMLSNEKFSKIVQDLLDCISQIISDVVLTFKHNMKQFGLESVNVNITSNPPSISISLAIKNA

SEQ ID NO: 42134 - protein, 85 aa, unidentified
  REGION 1..85: note = Description of Unknown:cds_NZ_WFIY01000004.1_cds_WP_155863186.1_1118 target sequence
ILQFIKEQIDKEEELVSNFDKSTSENNYDKAVSDFFQLIQRTNLMYAYIMQPSVLSMLSNEKFSKIVQDLLDCISQIISDVVLTF

SEQ ID NO: 42135 - protein, 85 aa, unidentified
  REGION 1..85: note = Description of Unknown:cds_NZ_WFIY01000004.1_cds_WP_155863599.1_1506 target sequence
IVQKTKKGKKGLSGAITALILVIASVIIALVVVFFAFGYLGAFSSSPTVTQVGTAKIIECTTSGSGTTTSYKLCVTLSSNTQTKI

SEQ ID NO: 42136 - protein, 84 aa, unidentified
  REGION 1..84: note = Description of Unknown:cds_NZ_WFIY01000004.1_cds_WP_155863599.1_1506 target sequence
TTSGSGTTTSYKLCVTLSSNTQTKIVAVEVGSHSISPAQCTIIYAGTNLYHIPLPSITYAAGQTYTVDLVLSGGQVVVVSAIAC

SEQ ID NO: 42137 - protein, 85 aa, unidentified
  REGION 1..85: note = Description of Unknown:cds_NZ_WFIY01000004.1_cds_WP_155863599.1_1506 target sequence
IALVVVFFAFGYLGAFSSSPTVTQVGTAKIIECTTSGSGTTTSYKLCVTLSSNTQTKIVAVEVGSHSISPAQCTIIYAGTNLYHI

SEQ ID NO: 42138 - protein, 85 aa, unidentified
  REGION 1..85: note = Description of Unknown:cds_NZ_WFIY01000004.1_cds_WP_155863853.1_1749 target sequence
INALQIRKANFSDVEEIYNLYNSLSPDDLYMRFFSFKRLSEQDVANLTKSSKVTLIAVIDSEIVGEISLYEDGEFSLVVKPEHRR

SEQ ID NO: 42139 - protein, 84 aa, unidentified
  REGION 1..84: note = Description of Unknown:cds_NZ_WFIY01000004.1_cds_WP_155863853.1_1749 target sequence
SEIVGEISLYEDGEFSLVVKPEHRRKGIGTMLVKSIIEEAKKLGMSKVKFYTLPDNIPMIKIGKKLGFTLRFSSDEVFGILSLQ

SEQ ID NO: 42140 - protein, 85 aa, unidentified
  REGION 1..85: note = Description of Unknown:cds_NZ_WFIY01000004.1_cds_WP_155863853.1_1749 target sequence
DLYMRFFSFKRLSEQDVANLTKSSKVTLIAVIDSEIVGEISLYEDGEFSLVVKPEHRRKGIGTMLVKSIIEEAKKLGMSKVKFYT

SEQ ID NO: 42141 - protein, 85 aa, unidentified
  REGION 1..85: note = Description of Unknown:cds_NZ_WFIY01000004.1_cds_WP_155864230.1_2200 target sequence
PLMWKHINGWDKCRDCWLAYEKGLQHENSLRCYKVGIPISSLNVPVEVFIDEIKKKGYVAKYGYFPFPVSLVSRGVIILYFESKE

SEQ ID NO: 42142 - protein, 84 aa, unidentified
  REGION 1..84: note = Description of Unknown:cds_NZ_WFIY01000004.1_cds_WP_155864230.1_2200 target sequence
KYGYFPFPVSLVSRGVIILYFESKEKMISAVNELRNFVKEPNIREKLFFNTFVNVDWMGGINYRRGCPEYDKKFGDWRKWGNPH

SEQ ID NO: 42143 - protein, 85 aa, unidentified
  REGION 1..85: note = Description of Unknown:cds_NZ_WFIY01000004.1_cds_WP_155864230.1_2200 target sequence
NSLRCYKVGIPISSLNVPVEVFIDEIKKKGYVAKYGYFPFPVSLVSRGVIILYFESKEKMISAVNELRNFVKEPNIREKLFFNTF

SEQ ID NO: 42144 - protein, 85 aa, unidentified
  REGION 1..85: note = Description of Unknown:cds_NC_007409.1_cds_YP_319873.1_42 target sequence
VKNMLHPQKYETHVLDDLMEFYEGVIGYPEIDLRLAGEEAWLKGVNPELAEAVKKIIKTIRRYLEGSPYDGSEKPIPRYIIAEIF

SEQ ID NO: 42145 - protein, 84 aa, unidentified
  REGION 1..84: note = Description of Unknown:cds_NC_007409.1_cds_YP_319873.1_42 target sequence
RYLEGSPYDGSEKPIPRYIIAEIFSQIAPEVQLLVNALDTEGKYGFLKHIKKLNLNSLAMLSKNYNENDKLWKELENEGYVYLE

SEQ ID NO: 42146 - protein, 85 aa, unidentified
  REGION 1..85: note = Description of Unknown:cds_NC_007409.1_cds_YP_319873.1_42 target sequence
YPEIDLRLAGEEAWLKGVNPELAEAVKKIIKTIRRYLEGSPYDGSEKPIPRYIIAEIFSQIAPEVQLLVNALDTEGKYGFLKHIK

SEQ ID NO: 42147 - protein, 85 aa, unidentified
  REGION 1..85: note = Description of Unknown:cds_NC_010495.1_cds_YP_001742088.1_51 target sequence
VEIKPCKNMEKSSPAGTMRNDGYLQVRFMNEIHLIHRIVWEMFNGEIPDGMQIDHINHDRGDNRIQNLRMVTKISNGRNLTKKIN

SEQ ID NO: 42148 - protein, 84 aa, unidentified
  REGION 1..84: note = Description of Unknown:cds_NC_010495.1_cds_YP_001742088.1_51 target sequence
DNRIQNLRMVTKISNGRNLTKKINNTSGVTGVSWYKSRGKWRVQIMVDRKSIHIGYFSDFESAVAARISANERYGFHKNHGVNC

SEQ ID NO: 42149 - protein, 85 aa, unidentified
  REGION 1..85: note = Description of Unknown:cds_NC_010495.1_cds_YP_001742088.1_51 target sequence
FMNEIHLIHRIVWEMFNGEIPDGMQIDHINHDRGDNRIQNLRMVTKISNGRNLTKKINNTSGVTGVSWYKSRGKWRVQIMVDRKS

SEQ ID NO: 42150 - protein, 85 aa, unidentified
  REGION 1..85: note = Description of Unknown:cds_NZ_WFIY01000004.1_cds_WP_155862369.1_103 target sequence
QNNIKFELRTYYVHFHRGRGLRHIILYLLYTNGPLTGAEIMEKVEESSMGMWRPSPGSVYPMIRELEAEGLIEVVKTEGTKKYYG

SEQ ID NO: 42151 - protein, 84 aa, unidentified
  REGION 1..84: note = Description of Unknown:cds_NZ_WFIY01000004.1_cds_WP_155862369.1_103 target sequence
YPMIRELEAEGLIEVVKTEGTKKYYGLTNKGKELLGGFPKERRIDNAITELESLVDYILDNWDSLNSEEKDRIRKIIEKLKSVS

SEQ ID NO: 42152 - protein, 85 aa, unidentified
  REGION 1..85: note = Description of Unknown:cds_NZ_WFIY01000004.1_cds_WP_155862369.1_103 target sequence
LLYTNGPLTGAEIMEKVEESSMGMWRPSPGSVYPMIRELEAEGLIEVVKTEGTKKYYGLTNKGKELLGGFPKERRIDNAITELES

SEQ ID NO: 42153 - protein, 85 aa, unidentified
  REGION 1..85: note = Description of Unknown:cds_NZ_WFIY01000004.1_cds_431 target sequence
VNERKRKGTSVEHYILSSLRDKGFAVVRAPASGSKRKDPIPDIIAMKNGVILLIEVKSRKEKNKVYVPRSQAEGIINFAKKSGGE

SEQ ID NO: 42154 - protein, 84 aa, unidentified
  REGION 1..84: note = Description of Unknown:cds_NZ_WFIY01000004.1_cds_431 target sequence
EKNKVYVPRSQAEGIINFAKKSGGELFLAVKFPKFLKFIPFSKLRITESGNYVADEEVIEEGLNLEDLVRAVEAKFSKTLDFFI

SEQ ID NO: 42155 - protein, 85 aa, unidentified
  REGION 1..85: note = Description of Unknown:cds_NZ_WFIY01000004.1_cds_431 target sequence
RAPASGSKRKDPIPDIIAMKNGVILLIEVKSRKEKNKVYVPRSQAEGIINFAKKSGGELFLAVKFPKFLKFIPFSKLRITESGNY

SEQ ID NO: 42156 - protein, 85 aa, unidentified
  REGION 1..85: note = Description of Unknown:cds_NZ_WFIY01000004.1_cds_WP_155863730.1_1596 target sequence
LSFLVGSPAPSWYDLKDIFEDYRSVAVYVDDKGNIEMIKVSSLDDCFLQTSVLVNPAYLKKLKPYYIKLPNFVAFPIFSLKILRK

SEQ ID NO: 42157 - protein, 84 aa, unidentified
  REGION 1..84: note = Description of Unknown:cds_NZ_WFIY01000004.1_cds_WP_155863730.1_1596 target sequence
KKLKPYYIKLPNFVAFPIFSLKILRKMIEMKYWRAIEYYSGNEFIGGWVLYDCKNCEEKQMLHLQVTANNDEELYLKHLSIYNS

SEQ ID NO: 42158 - protein, 85 aa, unidentified
  REGION 1..85: note = Description of Unknown:cds_NZ_WFIY01000004.1_cds_WP_155863730.1_1596 target sequence
YVDDKGNIEMIKVSSLDDCFLQTSVLVNPAYLKKLKPYYIKLPNFVAFPIFSLKILRKMIEMKYWRAIEYYSGNEFIGGWVLYDC

SEQ ID NO: 42159 - protein, 85 aa, unidentified
  REGION 1..85: note = Description of Unknown:cds_NZ_WFIY01000004.1_cds_WP_155864142.1_2095 target sequence
KGTTNSKKYIVMVSVIIFLIVIISIIAIKPSSSKNCTITIIKQGCIKHGILPCMAKIGLNGSVYYFNLTVYNPGKSVPICCIRLD

SEQ ID NO: 42160 - protein, 84 aa, unidentified
  REGION 1..84: note = Description of Unknown:cds_NZ_WFIY01000004.1_cds_WP_155864142.1_2095 target sequence
NGSVYYFNLTVYNPGKSVPICCIRLDKVAITFNKIFVFYKNSYYGDEIPQGKNIIIIAFNTTCSNITSLTIHLENGQNLQLNFA

SEQ ID NO: 42161 - protein, 85 aa, unidentified
  REGION 1..85: note = Description of Unknown:cds_NZ_WFIY01000004.1_cds_WP_155864142.1_2095 target sequence
IKPSSSKNCTITIIKQGCIKHGILPCMAKIGLNGSVYYFNLTVYNPGKSVPICCIRLDKVAITFNKIFVFYKNSYYGDEIPQGKN

SEQ ID NO: 42162 - protein, 85 aa, unidentified
  REGION 1..85: note = Description of Unknown:cds_NZ_WFIY01000004.1_cds_WP_155864247.1_2225 target sequence
DCCFNYIGFVRREDNSASRNSVVRIVIKEEYVEGLKGVEEFSHLIIIYHLHLANLNKGLKRVRGGVEVGVFATRSQHRPNPIGIS

SEQ ID NO: 42163 - protein, 84 aa, unidentified
  REGION 1..84: note = Description of Unknown:cds_NZ_WFIY01000004.1_cds_WP_155864247.1_2225 target sequence
KRVRGGVEVGVFATRSQHRPNPIGISVVELIKREGNTLYVKGINAFDGTPVLDIKPYDEWDSILNPKVPEWHKIEMRSRVTDSF

SEQ ID NO: 42164 - protein, 85 aa, unidentified
  REGION 1..85: note = Description of Unknown:cds_NZ_WFIY01000004.1_cds_WP_155864247.1_2225 target sequence
KEEYVEGLKGVEEFSHLIIIYHLHLANLNKGLKRVRGGVEVGVFATRSQHRPNPIGISVVELIKREGNTLYVKGINAFDGTPVLD

SEQ ID NO: 42165 - protein, 85 aa, unidentified
  REGION 1..85: note = Description of Unknown:cds_NC_029316.1_cds_YP_009230255.1_2 target sequence
AEVNSKSKYGSCLIITRHKLLPAQEEDLRSICDKIEIKPELPTNPQELQKVVEPYNTIVGSFPIQLQVEVLKNKKALIVFAMESL

SEQ ID NO: 42166 - protein, 84 aa, unidentified
  REGION 1..84: note = Description of Unknown:cds_NC_029316.1_cds_YP_009230255.1_2 target sequence
GSFPIQLQVEVLKNKKALIVFAMESLGVFETKEEAEQKASQYQGRTAILTPSKEGEKFRVTLYQGLKRIVEIKVIDEWLIQHSS

SEQ ID NO: 42167 - protein, 85 aa, unidentified
  REGION 1..85: note = Description of Unknown:cds_NC_029316.1_cds_YP_009230255.1_2 target sequence
LRSICDKIEIKPELPTNPQELQKVVEPYNTIVGSFPIQLQVEVLKNKKALIVFAMESLGVFETKEEAEQKASQYQGRTAILTPSK

SEQ ID NO: 42168 - protein, 85 aa, unidentified
  REGION 1..85: note = Description of Unknown:cds_NC_030656.1_cds_YP_009268752.1_37 target sequence
LGESRLYVTLLSEHATVPTKGSEGSAGYDLYSAYDYVVEAKSRALVKTDIQISLPSGCYGRIAPRSGLAVKHFIDVGAGVIDSDY

SEQ ID NO: 42169 - protein, 84 aa, unidentified
  REGION 1..84: note = Description of Unknown:cds_NC_030656.1_cds_YP_009268752.1_37 target sequence
GRIAPRSGLAVKHFIDVGAGVIDSDYRGNVGIVLFNFGEKSYSIKKGDRVAQLICEKIEMPQIEVANYLDCTKRGAKGFGSTGN

SEQ ID NO: 42170 - protein, 85 aa, unidentified
  REGION 1..85: note = Description of Unknown:cds_NC_030656.1_cds_YP_009268752.1_37 target sequence
YDLYSAYDYVVEAKSRALVKTDIQISLPSGCYGRIAPRSGLAVKHFIDVGAGVIDSDYRGNVGIVLFNFGEKSYSIKKGDRVAQL

SEQ ID NO: 42171 - protein, 85 aa, unidentified
  REGION 1..85: note = Description of Unknown:cds_NC_030656.1_cds_YP_009268796.1_81 target sequence
DEKIKVLCSTIFIDKLSTTDLLALELFLNKKNIFSQMICVDENNSLVLDFKFESYNVSDYLTVELTQLTSKDRKKHISEIAKHLT

SEQ ID NO: 42172 - protein, 84 aa, unidentified
  REGION 1..84: note = Description of Unknown:cds_NC_030656.1_cds_YP_009268796.1_81 target sequence
YLTVELTQLTSKDRKKHISEIAKHLTTVNVIQSNPEDYVKKSPTLKTFVKVYKNKKRIDKAKRLMKIAEEKGINCAFVADTLLI

SEQ ID NO: 42173 - protein, 85 aa, unidentified
  REGION 1..85: note = Description of Unknown:cds_NC_030656.1_cds_YP_009268796.1_81 target sequence
LNKKNIFSQMICVDENNSLVLDFKFESYNVSDYLTVELTQLTSKDRKKHISEIAKHLTTVNVIQSNPEDYVKKSPTLKTFVKVYK

SEQ ID NO: 42174 - protein, 85 aa, unidentified
  REGION 1..85: note = Description of Unknown:cds_NC_005830.1_cds_YP_003737.1_12 target sequence
TIVNILRVDIDQPFDYLDKQFYGNLTLRKLLVWRIFYVSKVFSQHVESLEFRKSLSGNIHVLVTINPGIQRTLVPLAQFLMGDDI

SEQ ID NO: 42175 - protein, 84 aa, unidentified
  REGION 1..84: note = Description of Unknown:cds_NC_005830.1_cds_YP_003737.1_12 target sequence
HVLVTINPGIQRTLVPLAQFLMGDDIMRTFMNLKRKGKGNYLFSYGNTDADRFLAERQIARKQKALNRKKSKTKNGEKNGEGKS

SEQ ID NO: 42176 - protein, 85 aa, unidentified
  REGION 1..85: note = Description of Unknown:cds_NC_005830.1_cds_YP_003737.1_12 target sequence
RKLLVWRIFYVSKVFSQHVESLEFRKSLSGNIHVLVTINPGIQRTLVPLAQFLMGDDIMRTFMNLKRKGKGNYLFSYGNTDADRF

SEQ ID NO: 42177 - protein, 85 aa, unidentified
  REGION 1..85: note = Description of Unknown:cds_NC_038931.1_cds_YP_009509134.1_18 target sequence
KYKFAIGFFISPSEFLLYNDYKKIRTIYNTVRVGGIDREVRVGIAHFMEGEYRIYIEGIPITVYRGDKTSASIYMSWGNWISMYN

SEQ ID NO: 42178 - protein, 84 aa, unidentified
  REGION 1..84: note = Description of Unknown:cds_NC_038931.1_cds_YP_009509134.1_18 target sequence
IPITVYRGDKTSASIYMSWGNWISMYNLSLERFLWAYNAKAIVIRPTGFKRGEGCLRRVLDEIDAGVYSGGRLLKPTIVQLREE

SEQ ID NO: 42179 - protein, 85 aa, unidentified
  REGION 1..85: note = Description of Unknown:cds_NC_038931.1_cds_YP_009509134.1_18 target sequence
YNTVRVGGIDREVRVGIAHFMEGEYRIYIEGIPITVYRGDKTSASIYMSWGNWISMYNLSLERFLWAYNAKAIVIRPTGFKRGEG

SEQ ID NO: 42180 - protein, 85 aa, unidentified
  REGION 1..85: note = Description of Unknown:cds_NZ_WFIY01000004.1_cds_412 target sequence
VKVIILKSENGKITSEKITEGDLAEVVRNTAIEALKEWNELTSDFIIMKDSQEAKLPLPLKPDVYEAVKNFLAGKEKSAAILKIP

SEQ ID NO: 42181 - protein, 84 aa, unidentified
  REGION 1..84: note = Description of Unknown:cds_NZ_WFIY01000004.1_cds_412 target sequence
LKPDVYEAVKNFLAGKEKSAAILKIPIFIISYDNIWQEENFQDKKVYVVSYYLNDDLKKELIEYAQGVTSEEKPQDSGEEEEEE

SEQ ID NO: 42182 - protein, 85 aa, unidentified
  REGION 1..85: note = Description of Unknown:cds_NZ_WFIY01000004.1_cds_412 target sequence
RNTAIEALKEWNELTSDFIIMKDSQEAKLPLPLKPDVYEAVKNFLAGKEKSAAILKIPIFIISYDNIWQEENFQDKKVYVVSYYL

SEQ ID NO: 42183 - protein, 85 aa, unidentified
  REGION 1..85: note = Description of Unknown:cds_NZ_WFIY01000004.1_cds_WP_155862748.1_559 target sequence
NLKGTKTAENLKTGFIGESMANRRYLYFAKKADEEGYPDIAAVFRSIAEGETAHAFGHLDFIRQGGLTDPATDKPIKTLEDMIQS

SEQ ID NO: 42184 - protein, 84 aa, unidentified
  REGION 1..84: note = Description of Unknown:cds_NZ_WFIY01000004.1_cds_WP_155862748.1_559 target sequence
LDFIRQGGLTDPATDKPIKTLEDMIQSAIAGETYEFTQMYPGFAKQAREEGFEEIAEWFETLARAEKSHAERYKQLLALLQGKQ

SEQ ID NO: 42185 - protein, 85 aa, unidentified
  REGION 1..85: note = Description of Unknown:cds_NZ_WFIY01000004.1_cds_WP_155862748.1_559 target sequence
FAKKADEEGYPDIAAVFRSIAEGETAHAFGHLDFIRQGGLTDPATDKPIKTLEDMIQSAIAGETYEFTQMYPGFAKQAREEGFEE

SEQ ID NO: 42186 - protein, 85 aa, unidentified
  REGION 1..85: note = Description of Unknown:cds_NZ_WFIY01000004.1_cds_WP_155864384.1_742 target sequence
LAADIAKVGINNVKIPPENIDEVKEALTRADIARLIKEGKIIIEKEKERSNSKVKERRKARRVKGEGRRHGSRKGKKTARFDEHE

SEQ ID NO: 42187 - protein, 84 aa, unidentified
  REGION 1..84: note = Description of Unknown:cds_NZ_WFIY01000004.1_cds_WP_155864384.1_742 target sequence
ARRVKGEGRRHGSRKGKKTARFDEHEAWVNRIRKIRKYLKWLRDHEVIDSHLYRQLYIRAKGGSFKSISDVRSVLIQMGKLKGE

SEQ ID NO: 42188 - protein, 85 aa, unidentified
  REGION 1..85: note = Description of Unknown:cds_NZ_WFIY01000004.1_cds_WP_155864384.1_742 target sequence
TRADIARLIKEGKIIIEKEKERSNSKVKERRKARRVKGEGRRHGSRKGKKTARFDEHEAWVNRIRKIRKYLKWLRDHEVIDSHLY

SEQ ID NO: 42189 - protein, 85 aa, unidentified
  REGION 1..85: note = Description of Unknown:cds_NZ_WFIY01000004.1_cds_WP_155862926.1_778 target sequence
LVQIIIDFVLIIWLSILTYLILYRNNLYIRKIKNKKDIKSKRYIVFYIISEDQKISQKNIEEAIRSAVKELLGSMWLEISNPRVI

SEQ ID NO: 42190 - protein, 84 aa, unidentified
  REGION 1..84: note = Description of Unknown:cds_NZ_WFIY01000004.1_cds_WP_155862926.1_778 target sequence
NIEEAIRSAVKELLGSMWLEISNPRVIIYLNDSNEGIISTNRAGYKAVIASLPLVKAVDGKKVLIVPKRTTGSLKKAKRLIGIR

SEQ ID NO: 42191 - protein, 85 aa, unidentified
  REGION 1..85: note = Description of Unknown:cds_NZ_WFIY01000004.1_cds_WP_155862926.1_778 target sequence
YIRKIKNKKDIKSKRYIVFYIISEDQKISQKNIEEAIRSAVKELLGSMWLEISNPRVIIYLNDSNEGIISTNRAGYKAVIASLPL

SEQ ID NO: 42192 - protein, 85 aa, unidentified
  REGION 1..85: note = Description of Unknown:cds_NZ_WFIY01000004.1_cds_WP_048054555.1_864 target sequence
LPEIKLTQDEIRYMSLFQEVTKVTAKDCVVDEENNRIIFLVDPHFMGLAIGKNGMNVKKLKKVLGKDIEIVAYSDNLEDMVKNLM

SEQ ID NO: 42193 - protein, 84 aa, unidentified
  REGION 1..84: note = Description of Unknown:cds_NZ_WFIY01000004.1_cds_WP_048054555.1_864 target sequence
LKKVLGKDIEIVAYSDNLEDMVKNLMSPARVRSVKVIDNDSKKTVYITVDPQDKGIAIGKSGKNVVRAKLILKRYMDIDSVVIV

SEQ ID NO: 42194 - protein, 85 aa, unidentified
  REGION 1..85: note = Description of Unknown:cds_NZ_WFIY01000004.1_cds_WP_048054555.1_864 target sequence
CVVDEENNRIIFLVDPHFMGLAIGKNGMNVKKLKKVLGKDIEIVAYSDNLEDMVKNLMSPARVRSVKVIDNDSKKTVYITVDPQD

SEQ ID NO: 42195 - protein, 85 aa, unidentified
  REGION 1..85: note = Description of Unknown:cds_NZ_WFIY01000004.1_cds_WP_155863358.1_1330 target sequence
KLVVGFIPFSATPDGLVVEKVYEMWKDKDFVLDLGMDPIAAAEEVRKLSPEKVLLVGSSRYAPEGISEKEIILETKDKWEMLELL

SEQ ID NO: 42196 - protein, 84 aa, unidentified
  REGION 1..84: note = Description of Unknown:cds_NZ_WFIY01000004.1_cds_WP_155863358.1_1330 target sequence
SRYAPEGISEKEIILETKDKWEMLELLRPGLDGRYYLEDVAYGLLIFSVVNKVYALYFRGDYNDENIAKLNAKVEEKVNWLLKS

SEQ ID NO: 42197 - protein, 85 aa, unidentified
  REGION 1..85: note = Description of Unknown:cds_NZ_WFIY01000004.1_cds_WP_155863358.1_1330 target sequence
KDFVLDLGMDPIAAAEEVRKLSPEKVLLVGSSRYAPEGISEKEIILETKDKWEMLELLRPGLDGRYYLEDVAYGLLIFSVVNKVY

SEQ ID NO: 42198 - protein, 85 aa, unidentified
  REGION 1..85: note = Description of Unknown:cds_NZ_WFIY01000004.1_cds_WP_155864445.1_1607 target sequence
LNRKKSIEKKEEKSTVENVEKTEERRDNIPVEKTIEEEEKKNEKREKTIENTPESTKNNIEEEEKKEDSREDSIESIMKKFLEKD

SEQ ID NO: 42199 - protein, 84 aa, unidentified
  REGION 1..84: note = Description of Unknown:cds_NZ_WFIY01000004.1_cds_WP_155864445.1_1607 target sequence
IEEEEKKEDSREDSIESIMKKFLEKDPKIGIWSYPAYLVLQYLYNTKPGFKMSKVAKEALEYGLKHMYPDLFSKAEKISQLKQR

SEQ ID NO: 42200 - protein, 85 aa, unidentified
  REGION 1..85: note = Description of Unknown:cds_NZ_WFIY01000004.1_cds_WP_155864445.1_1607 target sequence
NIPVEKTIEEEEKKNEKREKTIENTPESTKNNIEEEEKKEDSREDSIESIMKKFLEKDPKIGIWSYPAYLVLQYLYNTKPGFKMS

SEQ ID NO: 42201 - protein, 85 aa, unidentified
  REGION 1..85: note = Description of Unknown:cds_NZ_WFIY01000004.1_cds_WP_155864455.1_1672 target sequence
CLFCKIVKKEESAYIVYEDEYTVAFLDKFPLAPGHTLVVTKEHFDDFLNTKKEYLEKLAFSSNIVSRAVKESVKSSGIRLLTNVG

SEQ ID NO: 42202 - protein, 84 aa, unidentified
  REGION 1..84: note = Description of Unknown:cds_NZ_WFIY01000004.1_cds_WP_155864455.1_1672 target sequence
AFSSNIVSRAVKESVKSSGIRLLTNVGKSAGQVIFHVHIHIIPTWDGSYPEEFSYFEPRKEQRKEYYEFLQRVISQNVKNILSL

SEQ ID NO: 42203 - protein, 85 aa, unidentified
  REGION 1..85: note = Description of Unknown:cds_NZ_WFIY01000004.1_cds_WP_155864455.1_1672 target sequence
KFPLAPGHTLVVTKEHFDDFLNTKKEYLEKLAFSSNIVSRAVKESVKSSGIRLLTNVGKSAGQVIFHVHIHIIPTWDGSYPEEFS

SEQ ID NO: 42204 - protein, 85 aa, unidentified
  REGION 1..85: note = Description of Unknown:cds_NZ_WFIY01000004.1_cds_WP_155863902.1_1810 target sequence
LKLVENISLDILNWYGDKLKGIIYEPNYNAILVILEDVDKISLFARGEIYNFFYNRLRKLDEFKKFVLENHKSPRLYGIILSPKE

SEQ ID NO: 42205 - protein, 84 aa, unidentified
  REGION 1..84: note = Description of Unknown:cds_NZ_WFIY01000004.1_cds_WP_155863902.1_1810 target sequence
KLDEFKKFVLENHKSPRLYGIILSPKELSYNIPKLIYIIHKGYILYDPKGLISNIRKANVKIVEDYDKKILDFGKVKKGEVIEI

SEQ ID NO: 42206 - protein, 85 aa, unidentified
  REGION 1..85: note = Description of Unknown:cds_NZ_WFIY01000004.1_cds_WP_155863902.1_1810 target sequence
YNAILVILEDVDKISLFARGEIYNFFYNRLRKLDEFKKFVLENHKSPRLYGIILSPKELSYNIPKLIYIIHKGYILYDPKGLISN

SEQ ID NO: 42207 - protein, 85 aa, unidentified
  REGION 1..85: note = Description of Unknown:cds_NZ_WFIY01000004.1_cds_WP_155864125.1_2077 target sequence
LSTRKRSMVFDSGILIDILSGSDEGKKLEKYIEDNLEEVVINELNVEEIKYVICRKNGEKKAEEVENMLKTSGYFTIFPFSRIKG

SEQ ID NO: 42208 - protein, 84 aa, unidentified
  REGION 1..84: note = Description of Unknown:cds_NZ_WFIY01000004.1_cds_WP_155864125.1_2077 target sequence
KKAEEVENMLKTSGYFTIFPFSRIKGEVYKIKCKYPISLADASSIATGKVLGLPTLFRREKEIEPFKAELNVIFVDEILTSSPP

SEQ ID NO: 42209 - protein, 85 aa, unidentified
  REGION 1..85: note = Description of Unknown:cds_NZ_WFIY01000004.1_cds_WP_155864125.1_2077 target sequence
LEKYIEDNLEEVVINELNVEEIKYVICRKNGEKKAEEVENMLKTSGYFTIFPFSRIKGEVYKIKCKYPISLADASSIATGKVLGL

SEQ ID NO: 42210 - protein, 85 aa, unidentified
  REGION 1..85: note = Description of Unknown:cds_NZ_WFIY01000004.1_cds_WP_155864350.1_2364 target sequence
AEELRKELNLDNKEKLDLGDYVTIMGKILSFRAKSSPSMHSVTKEVREALEEVRKNPTGNLEEIIKIMISQDSPFQKKELANLYR

SEQ ID NO: 42211 - protein, 84 aa, unidentified
  REGION 1..84: note = Description of Unknown:cds_NZ_WFIY01000004.1_cds_WP_155864350.1_2364 target sequence
GNLEEIIKIMISQDSPFQKKELANLYREALEGLLKKFAEVSSKMNPQESRKLMNMVLEGIYNNAVFYSKTFGQKIWNILKGDHS

SEQ ID NO: 42212 - protein, 85 aa, unidentified
  REGION 1..85: note = Description of Unknown:cds_NZ_WFIY01000004.1_cds_WP_155864350.1_2364 target sequence
ILSFRAKSSPSMHSVTKEVREALEEVRKNPTGNLEEIIKIMISQDSPFQKKELANLYREALEGLLKKFAEVSSKMNPQESRKLMN

SEQ ID NO: 42213 - protein, 85 aa, unidentified
  REGION 1..85: note = Description of Unknown:cds_NC_035460.1_cds_YP_009408113.1_162 target sequence
DYEQRDYLYPSDDIKDVISEYIKWRSYNSKNNYGMVFKTFKEFEKQAELKFGSCMYTLIKPMKLSISDGPRMDKIDTSTATATEI

SEQ ID NO: 42214 - protein, 84 aa, unidentified
  REGION 1..84: note = Description of Unknown:cds_NC_035460.1_cds_YP_009408113.1_162 target sequence
IKPMKLSISDGPRMDKIDTSTATATEIIGLCANMANYIGEQFNIINWETVFKTLFDVLQGHDLNIIKMSLYTNEDKLSVSNKFM

SEQ ID NO: 42215 - protein, 85 aa, unidentified
  REGION 1..85: note = Description of Unknown:cds_NC_035460.1_cds_YP_009408113.1_162 target sequence
NSKNNYGMVFKTFKEFEKQAELKFGSCMYTLIKPMKLSISDGPRMDKIDTSTATATEIIGLCANMANYIGEQFNIINWETVFKTL

SEQ ID NO: 42216 - protein, 85 aa, unidentified
  REGION 1..85: note = Description of Unknown:cds_NC_024711.1_cds_YP_009052556.1_80 target sequence
AYFGDAFKKLSIKEGGYVNDKDDAGGETYRGISRKYNPTWQGWTMIDSYKKHYTVGSKEFKSKLDNDVQLQKLVWEKYKIGYWDV

SEQ ID NO: 42217 - protein, 84 aa, unidentified
  REGION 1..84: note = Description of Unknown:cds_NC_024711.1_cds_YP_009052556.1_80 target sequence
KEFKSKLDNDVQLQKLVWEKYKIGYWDVFELDDFNSQRVAEQLFDTNVNCGQVAAIKMAQRVLGLKETGRWNLDLLNKLIEIKD

SEQ ID NO: 42218 - protein, 85 aa, unidentified
  REGION 1..85: note = Description of Unknown:cds_NC_024711.1_cds_YP_009052556.1_80 target sequence
TYRGISRKYNPTWQGWTMIDSYKKHYTVGSKEFKSKLDNDVQLQKLVWEKYKIGYWDVFELDDFNSQRVAEQLFDTNVNCGQVAA

SEQ ID NO: 42219 - protein, 85 aa, unidentified
  REGION 1..85: note = Description of Unknown:cds_NZ_WFIY01000004.1_cds_WP_152941218.1_112 target sequence
ESEENLIKFILENYKNIATIGFSKDPSKPSHYVPKFLMEHGYNVIPVNPTAKEILGKKSYSSILEIPDRIDVVEVFRPSSEVPKI

SEQ ID NO: 42220 - protein, 84 aa, unidentified
  REGION 1..84: note = Description of Unknown:cds_NZ_WFIY01000004.1_cds_WP_152941218.1_112 target sequence
KSYSSILEIPDRIDVVEVFRPSSEVPKIVEEVIKRKREKGDVKVLWLQEGIRNDDAAKLAEKEGIIVIQDRCMYKEYNKLMQNK

SEQ ID NO: 42221 - protein, 85 aa, unidentified
  REGION 1..85: note = Description of Unknown:cds_NZ_WFIY01000004.1_cds_WP_152941218.1_112 target sequence
KPSHYVPKFLMEHGYNVIPVNPTAKEILGKKSYSSILEIPDRIDVVEVFRPSSEVPKIVEEVIKRKREKGDVKVLWLQEGIRNDD

SEQ ID NO: 42222 - protein, 85 aa, unidentified
  REGION 1..85: note = Description of Unknown:cds_NZ_WFIY01000004.1_cds_WP_155863934.1_1851 target sequence
EEKIGNLKGGMENVNVTGRVLQVGEQKVVQTRNGQRTIREVMIGDETGRIKLTLWGNQGDNIKEGQVIKVENGWTTVFKGQVQLN

SEQ ID NO: 42223 - protein, 84 aa, unidentified
  REGION 1..84: note = Description of Unknown:cds_NZ_WFIY01000004.1_cds_WP_155863934.1_1851 target sequence
QGDNIKEGQVIKVENGWTTVFKGQVQLNAGSRSKISESQEEVPEADQIPETTPTDNSPPRRNFRGGRRNFRGRRPPQRGGDEEE

SEQ ID NO: 42224 - protein, 85 aa, unidentified
  REGION 1..85: note = Description of Unknown:cds_NZ_WFIY01000004.1_cds_WP_155863934.1_1851 target sequence
VVQTRNGQRTIREVMIGDETGRIKLTLWGNQGDNIKEGQVIKVENGWTTVFKGQVQLNAGSRSKISESQEEVPEADQIPETTPTD

SEQ ID NO: 42225 - protein, 85 aa, unidentified
  REGION 1..85: note = Description of Unknown:cds_NC_035460.1_cds_YP_009408126.1_175 target sequence
NKTILFVLGQLLLFNLIYANDNQPIIAENIKSLTSLTIWAPTNYQTPFKLVCEGTNESPWFAVYWLIDGQISEQYTQITEKYTNI

SEQ ID NO: 42226 - protein, 84 aa, unidentified
  REGION 1..84: note = Description of Unknown:cds_NC_035460.1_cds_YP_009408126.1_175 target sequence
SPWFAVYWLIDGQISEQYTQITEKYTNIKKRDNYYMLKSTLTILNWDMYKDYNLTCVMADAKEGILKRSTKLSLLEECMSVNNH

SEQ ID NO: 42227 - protein, 85 aa, unidentified
  REGION 1..85: note = Description of Unknown:cds_NC_035460.1_cds_YP_009408126.1_175 target sequence
ENIKSLTSLTIWAPTNYQTPFKLVCEGTNESPWFAVYWLIDGQISEQYTQITEKYTNIKKRDNYYMLKSTLTILNWDMYKDYNLT

SEQ ID NO: 42228 - protein, 85 aa, unidentified
  REGION 1..85: note = Description of Unknown:cds_NC_030656.1_cds_YP_009268717.1_2 target sequence
EGNAAALEAYSRFNAIKESRKTRSSFLKPMILEGNRATVTVHAPSVRSNVSVIDRVRFSSTKCEELYLRLELTDVEEQSICAVEN

SEQ ID NO: 42229 - protein, 84 aa, unidentified
  REGION 1..84: note = Description of Unknown:cds_NC_030656.1_cds_YP_009268717.1_2 target sequence
FSSTKCEELYLRLELTDVEEQSICAVENLVKKCGVENSAANFVPGTHGKRGTVIADLCSLGGGWAEALLGELERELARKIETLY

SEQ ID NO: 42230 - protein, 85 aa, unidentified
  REGION 1..85: note = Description of Unknown:cds_NC_030656.1_cds_YP_009268717.1_2 target sequence
KPMILEGNRATVTVHAPSVRSNVSVIDRVRFSSTKCEELYLRLELTDVEEQSICAVENLVKKCGVENSAANFVPGTHGKRGTVIA

SEQ ID NO: 42231 - protein, 85 aa, unidentified
  REGION 1..85: note = Description of Unknown:cds_NC_030656.1_cds_YP_009268838.1_123 target sequence
DAITIMCIVIVTVAACVMMLQAYSIYENYENIKEFNSENASLEYAKSTGGMRVDYRVKDPNDTTHDVKQKWRCVIKQNVYVSASI

SEQ ID NO: 42232 - protein, 84 aa, unidentified
  REGION 1..84: note = Description of Unknown:cds_NC_030656.1_cds_YP_009268838.1_123 target sequence
KDPNDTTHDVKQKWRCVIKQNVYVSASIFGFLSDNSKTIKQFYTLDECILYTFMPKIDNNIYNPCVPPNERSEDCIFLKSILSK

SEQ ID NO: 42233 - protein, 85 aa, unidentified
  REGION 1..85: note = Description of Unknown:cds_NC_030656.1_cds_YP_009268838.1_123 target sequence
NYENIKEFNSENASLEYAKSTGGMRVDYRVKDPNDTTHDVKQKWRCVIKQNVYVSASIFGFLSDNSKTIKQFYTLDECILYTFMP

SEQ ID NO: 42234 - protein, 85 aa, unidentified
  REGION 1..85: note = Description of Unknown:cds_NC_038667.1_cds_YP_009507786.1_8 target sequence
SGRSRRTLPVSDCSFYGPWIISGTYPVVSLICFREITYYINVDIPLDHPQRVVLPHLVADPVVWHVQLINRRATDSFKPYFCELD

SEQ ID NO: 42235 - protein, 84 aa, unidentified
  REGION 1..84: note = Description of Unknown:cds_NC_038667.1_cds_YP_009507786.1_8 target sequence
VADPVVWHVQLINRRATDSFKPYFCELDCVLIRVTPLTSHNRSHVIIHYSPFAQSPAAKRSYRFDHDDDPEHKRFAIRSVCYSQ

SEQ ID NO: 42236 - protein, 85 aa, unidentified
  REGION 1..85: note = Description of Unknown:cds_NC_038667.1_cds_YP_009507786.1_8 target sequence
VSLICFREITYYINVDIPLDHPQRVVLPHLVADPVVWHVQLINRRATDSFKPYFCELDCVLIRVTPLTSHNRSHVIIHYSPFAQS

SEQ ID NO: 42237 - protein, 85 aa, unidentified
  REGION 1..85: note = Description of Unknown:cds_NC_009884.1_cds_YP_001496934.1_9 target sequence
SLPKKKKPEVEEEEKPEEEEEKEEEQEIDINNLEWQNIATSNAFKVDIGDEIIFKPTSEPKQVKSGSAFVVDAYVYQWKSQNQVP

SEQ ID NO: 42238 - protein, 84 aa, unidentified
  REGION 1..84: note = Description of Unknown:cds_NC_009884.1_cds_YP_001496934.1_9 target sequence
SEPKQVKSGSAFVVDAYVYQWKSQNQVPQKGNATLYIQTVLGNAIIRAVQQYGLGNFVVHAKNKGRAKGKLYYDYEIKIAKVKQ

SEQ ID NO: 42239 - protein, 85 aa, unidentified
  REGION 1..85: note = Description of Unknown:cds_NC_009884.1_cds_YP_001496934.1_9 target sequence
IDINNLEWQNIATSNAFKVDIGDEIIFKPTSEPKQVKSGSAFVVDAYVYQWKSQNQVPQKGNATLYIQTVLGNAIIRAVQQYGLG

SEQ ID NO: 42240 - protein, 85 aa, unidentified
  REGION 1..85: note = Description of Unknown:hvTR_C7B7D2 target sequence
ENPFPNDLRSYCNYFGICLFDLRLQCIFCKSILDIVDLAKFHKKELRLVWRCKVAYACCSKCLYASARYENENHFQCAVKASTLH

SEQ ID NO: 42241 - protein, 84 aa, unidentified
  REGION 1..84: note = Description of Unknown:hvTR_C7B7D2 target sequence
ACCSKCLYASARYENENHFQCAVKASTLHDLLGTPLHQIYMRCNHCLSGLDLQEKFDLVARDCYVILVRGYWRGPCRDCINREY

SEQ ID NO: 42242 - protein, 85 aa, unidentified
  REGION 1..85: note = Description of Unknown:hvTR_C7B7D2 target sequence
FCKSILDIVDLAKFHKKELRLVWRCKVAYACCSKCLYASARYENENHFQCAVKASTLHDLLGTPLHQIYMRCNHCLSGLDLQEKF

SEQ ID NO: 42243 - protein, 85 aa, unidentified
  REGION 1..85: note = Description of Unknown:vpeps_3GPA_1 target sequence
HSEQSYFNDLCDFMVSGPIISIVYEGTDAISKIRRLQGNILTPGTIRGDLANDIRENLIHASDSEDSAVDEISIWFPETKMETDN

SEQ ID NO: 42244 - protein, 85 aa, unidentified
  REGION 1..85: note = Description of Unknown:vpeps_3GPA_1 target sequence
GRIEKKNFKIVSMKFWSKAPRNLIEQHYKEHSEQSYFNDLCDFMVSGPIISIVYEGTDAISKIRRLQGNILTPGTIRGDLANDIR

SEQ ID NO: 42245 - protein, 85 aa, unidentified
  REGION 1..85: note = Description of Unknown:vpeps_3GP9_1 target sequence
GRIEKKNFKIVSMKFWSKAPRNLIEQHYKEHSEQSYFNDNCDFMVSGPIISIVYEGTDAISKIRRLQGNILTPGTIRGDLANDIR

SEQ ID NO: 42246 - protein, 85 aa, unidentified
  REGION 1..85: note = Description of Unknown:vpeps_3FBE_1 target sequence
HSEQSYFNDLCDFMVSGPIISIVYEGTDAISKIRRLQGNILTPGTIRGDLANDIGENLIHASDSEDSAVDEISIWFPETKMETDN

SEQ ID NO: 42247 - protein, 85 aa, unidentified
  REGION 1..85: note = Description of Unknown:vpeps_3FBE_1 target sequence
GRIEKKNFKIVSMKFWSKAPRNLIEQHYKEHSEQSYFNDLCDFMVSGPIISIVYEGTDAISKIRRLQGNILTPGTIRGDLANDIG

SEQ ID NO: 42248 - protein, 85 aa, unidentified
  REGION 1..85: note = Description of Unknown:vpeps_3EVW_1 target sequence
HSEQSYFNDNCDFMVSGPIISIVYEGTDAISKIRRLQGNILTPGTIRGDLANDIGENLIHASDSEDSAVDEISIWFPETKMETDN

SEQ ID NO: 42249 - protein, 85 aa, unidentified
  REGION 1..85: note = Description of Unknown:vpeps_3EVW_1 target sequence
GRIEKKNFKIVSMKFWSKAPRNLIEQHYKEHSEQSYFNDNCDFMVSGPIISIVYEGTDAISKIRRLQGNILTPGTIRGDLANDIG

SEQ ID NO: 42250 - protein, 85 aa, unidentified
  REGION 1..85: note = Description of Unknown:cds_NC_038931.1_cds_YP_009509131.1_15 target sequence
SSPIISNYLEGIRDNKYLQRIEWEIQVAQSGFRAIPITERWWGEASYYIDLANKIKALPELSNVKTKPIGYALAAARYVKHNNFG

SEQ ID NO: 42251 - protein, 84 aa, unidentified
  REGION 1..84: note = Description of Unknown:cds_NC_038931.1_cds_YP_009509131.1_15 target sequence
ALPELSNVKTKPIGYALAAARYVKHNNFGMAEIYLDRFESALVRSGLSRDMARRVREHVAKMIGLGGGGGGGGGGGGGGGVSLP

SEQ ID NO: 42252 - protein, 85 aa, unidentified
  REGION 1..85: note = Description of Unknown:cds_NC_038931.1_cds_YP_009509131.1_15 target sequence
AQSGFRAIPITERWWGEASYYIDLANKIKALPELSNVKTKPIGYALAAARYVKHNNFGMAEIYLDRFESALVRSGLSRDMARRVR

SEQ ID NO: 42253 - protein, 85 aa, unidentified
  REGION 1..85: note = Description of Unknown:cds_NZ_WFIY01000004.1_cds_WP_155862459.1_211 target sequence
LDKILELGLKEIFGSSPAEKVTLKDALQGKNKIRLNNGFYHELNLAEVKDFSSKVPLYLWSLVYLPIIILKLPEPGQFSLEGSEW

SEQ ID NO: 42254 - protein, 84 aa, unidentified
  REGION 1..84: note = Description of Unknown:cds_NZ_WFIY01000004.1_cds_WP_155862459.1_211 target sequence
LYLWSLVYLPIIILKLPEPGQFSLEGSEWDKKAVSLILNKEEGDKIILNTVDVEDLLRRYKTLIFITLSSNILFSANSELGEGI

SEQ ID NO: 42255 - protein, 85 aa, unidentified
  REGION 1..85: note = Description of Unknown:cds_NZ_WFIY01000004.1_cds_WP_155862459.1_211 target sequence
QGKNKIRLNNGFYHELNLAEVKDFSSKVPLYLWSLVYLPIIILKLPEPGQFSLEGSEWDKKAVSLILNKEEGDKIILNTVDVEDL

SEQ ID NO: 42256 - protein, 85 aa, unidentified
  REGION 1..85: note = Description of Unknown:cds_NZ_WFIY01000004.1_cds_WP_155862744.1_554 target sequence
SKERKNTDILVFPFSEIFGNKVPLIDIFVECPSIGSMVKMKGLIDTGSRYTLLDKEKALYCFNDLDSRYHDLAVINGALTKRYLI

SEQ ID NO: 42257 - protein, 84 aa, unidentified
  REGION 1..84: note = Description of Unknown:cds_NZ_WFIY01000004.1_cds_WP_155862744.1_554 target sequence
KALYCFNDLDSRYHDLAVINGALTKRYLIKIKLGSSELDVPVSLFSLQSLSLPVVPEIILGREDFLEKFIVTLYKSHFITIYLD

SEQ ID NO: 42258 - protein, 85 aa, unidentified
  REGION 1..85: note = Description of Unknown:cds_NZ_WFIY01000004.1_cds_WP_155862744.1_554 target sequence
FVECPSIGSMVKMKGLIDTGSRYTLLDKEKALYCFNDLDSRYHDLAVINGALTKRYLIKIKLGSSELDVPVSLFSLQSLSLPVVP

SEQ ID NO: 42259 - protein, 85 aa, unidentified
  REGION 1..85: note = Description of Unknown:cds_NZ_WFIY01000004.1_cds_WP_013775687.1_717 target sequence
SSKIDNNDLKILETLKKNARTPYTLIAKDLKISEAAVRKRIEKLIRLGIIKRFTIEYELENEIKAIVMVKSTPQIPTPEISKKII

SEQ ID NO: 42260 - protein, 84 aa, unidentified
  REGION 1..84: note = Description of Unknown:cds_NZ_WFIY01000004.1_cds_WP_013775687.1_717 target sequence
YELENEIKAIVMVKSTPQIPTPEISKKIIKISGVETVYETTGDYDIITIVRGINIAEINKTIDEIRSIQGVISTTSTIILRTWY

SEQ ID NO: 42261 - protein, 85 aa, unidentified
  REGION 1..85: note = Description of Unknown:cds_NZ_WFIY01000004.1_cds_WP_013775687.1_717 target sequence
KDLKISEAAVRKRIEKLIRLGIIKRFTIEYELENEIKAIVMVKSTPQIPTPEISKKIIKISGVETVYETTGDYDIITIVRGINIA

SEQ ID NO: 42262 - protein, 85 aa, unidentified
  REGION 1..85: note = Description of Unknown:cds_NZ_WFIY01000004.1_cds_WP_155864385.1_794 target sequence
LHNITSSQRLIDFAKIVFNLGVEKLVVTKASGTAAQVGIPEVGKLAFKLNKSLLILPDLKDSIELLKPSSVYLVSSSARDEINIE

SEQ ID NO: 42263 - protein, 84 aa, unidentified
  REGION 1..84: note = Description of Unknown:cds_NZ_WFIY01000004.1_cds_WP_155864385.1_794 target sequence
DLKDSIELLKPSSVYLVSSSARDEINIEDIRNKKDSNQILIIFSGIESGFTKIEQSLGNYVKIPKLSGDLGPEAEVAILLYTLL

SEQ ID NO: 42264 - protein, 85 aa, unidentified
  REGION 1..85: note = Description of Unknown:cds_NZ_WFIY01000004.1_cds_WP_155864385.1_794 target sequence
TKASGTAAQVGIPEVGKLAFKLNKSLLILPDLKDSIELLKPSSVYLVSSSARDEINIEDIRNKKDSNQILIIFSGIESGFTKIEQ

SEQ ID NO: 42265 - protein, 85 aa, unidentified
  REGION 1..85: note = Description of Unknown:cds_NZ_WFIY01000004.1_cds_WP_155864393.1_939 target sequence
LQQIYEIEVESFDNPYPYSLLKAYLYIADGLYLVVKEDGKILGYVIGIIQFKIRGHIVSIAVRKSYRNKGIGKLLINEIERRFKL

SEQ ID NO: 42266 - protein, 84 aa, unidentified
  REGION 1..84: note = Description of Unknown:cds_NZ_WFIY01000004.1_cds_WP_155864393.1_939 target sequence
VSIAVRKSYRNKGIGKLLINEIERRFKLGHCKYSYLEVMTTNKDAFYFYVHNGYFPLFVRKNYYGRGKHAFVMVKDLYSRKGLE

SEQ ID NO: 42267 - protein, 85 aa, unidentified
  REGION 1..85: note = Description of Unknown:cds_NZ_WFIY01000004.1_cds_WP_155864393.1_939 target sequence
ADGLYLVVKEDGKILGYVIGIIQFKIRGHIVSIAVRKSYRNKGIGKLLINEIERRFKLGHCKYSYLEVMTTNKDAFYFYVHNGYF

SEQ ID NO: 42268 - protein, 85 aa, unidentified
  REGION 1..85: note = Description of Unknown:cds_NZ_WFIY01000004.1_cds_WP_013775344.1_1068 target sequence
FKHVLVAYDGSSHAKRALEIAIDLAKKYEAKLDIVEVVDSTVFAGAGIAPVPADVIESVYNRAKADIEEAKKKSKEGGVEAEGVI

SEQ ID NO: 42269 - protein, 84 aa, unidentified
  REGION 1..84: note = Description of Unknown:cds_NZ_WFIY01000004.1_cds_WP_013775344.1_1068 target sequence
ESVYNRAKADIEEAKKKSKEGGVEAEGVILEGDPASAILEYANKNNVDLIVTGSRGLSTLKRVFLGSVSTRLVQEAKIPVMVVK

SEQ ID NO: 42270 - protein, 85 aa, unidentified
  REGION 1..85: note = Description of Unknown:cds_NZ_WFIY01000004.1_cds_WP_013775344.1_1068 target sequence
YEAKLDIVEVVDSTVFAGAGIAPVPADVIESVYNRAKADIEEAKKKSKEGGVEAEGVILEGDPASAILEYANKNNVDLIVTGSRG

SEQ ID NO: 42271 - protein, 85 aa, unidentified
  REGION 1..85: note = Description of Unknown:cds_NZ_WFIY01000004.1_cds_WP_155863168.1_1098 target sequence
EKRIKVIIAKLGLDGHDRGAKVVARALKDAGMEVVYTGLRQTPSQIVKTAIQEDADVIGVSILSGAHLELIPPLINLMKENGLTD

SEQ ID NO: 42272 - protein, 84 aa, unidentified
  REGION 1..84: note = Description of Unknown:cds_NZ_WFIY01000004.1_cds_WP_155863168.1_1098 target sequence
VIGVSILSGAHLELIPPLINLMKENGLTDVGLIVGGVIPPQDVEKLKSMGVDEVFLPGSSLKEIVEKVKKVAEKKRGIKIGQTT

SEQ ID NO: 42273 - protein, 85 aa, unidentified
  REGION 1..85: note = Description of Unknown:cds_NZ_WFIY01000004.1_cds_WP_155863168.1_1098 target sequence
KDAGMEVVYTGLRQTPSQIVKTAIQEDADVIGVSILSGAHLELIPPLINLMKENGLTDVGLIVGGVIPPQDVEKLKSMGVDEVFL

SEQ ID NO: 42274 - protein, 85 aa, unidentified
  REGION 1..85: note = Description of Unknown:cds_NZ_WFIY01000004.1_cds_WP_155863184.1_1115 target sequence
ERPLVAVGGVIFSGKRVLLVQRSKPPNKGSWAIPGGKVEFGETLKEALIREMKEELNVNVEPKELLGVIEIIKEGFHYVILDFIC

SEQ ID NO: 42275 - protein, 84 aa, unidentified
  REGION 1..84: note = Description of Unknown:cds_NZ_WFIY01000004.1_cds_WP_155863184.1_1115 target sequence
NVNVEPKELLGVIEIIKEGFHYVILDFICEIKSGEIKAGSDALDAKFFSLEEMSKIPISPTTIEMIRRYFEGERIPLFITEISR

SEQ ID NO: 42276 - protein, 85 aa, unidentified
  REGION 1..85: note = Description of Unknown:cds_NZ_WFIY01000004.1_cds_WP_155863184.1_1115 target sequence
KGSWAIPGGKVEFGETLKEALIREMKEELNVNVEPKELLGVIEIIKEGFHYVILDFICEIKSGEIKAGSDALDAKFFSLEEMSKI

SEQ ID NO: 42277 - protein, 85 aa, unidentified
  REGION 1..85: note = Description of Unknown:cds_NZ_WFIY01000004.1_cds_1447 target sequence
VSGNRVQRLKRRALRFLADAKNDYNEGYYDTSTFHVEQALQLYIKAIIFELFGKDYVGYGIRELLGYLSKLLKENGYEDLSRKLN

SEQ ID NO: 42278 - protein, 84 aa, unidentified
  REGION 1..84: note = Description of Unknown:cds_NZ_WFIY01000004.1_cds_1447 target sequence
GYGIRELLGYLSKLLKENGYEDLSRKLNELIREYREQLISIEDAYIDSRYEDIDYYEEESKELIDVADKIINFLEEVAKNVKLG

SEQ ID NO: 42279 - protein, 85 aa, unidentified
  REGION 1..85: note = Description of Unknown:cds_NZ_WFIY01000004.1_cds_1447 target sequence
YYDTSTFHVEQALQLYIKAIIFELFGKDYVGYGIRELLGYLSKLLKENGYEDLSRKLNELIREYREQLISIEDAYIDSRYEDIDY

SEQ ID NO: 42280 - protein, 85 aa, unidentified
  REGION 1..85: note = Description of Unknown:cds_NZ_WFIY01000004.1_cds_WP_205737148.1_1763 target sequence
VKVVEAISEIGRNLFPSETVDALQGKVDKNELIKLRLDNAKFYLSQAKEINSPVIVSELLHKSLTEGFKALKDYFGIQKELKDSI

SEQ ID NO: 42281 - protein, 84 aa, unidentified
  REGION 1..84: note = Description of Unknown:cds_NZ_WFIY01000004.1_cds_WP_205737148.1_1763 target sequence
ELLHKSLTEGFKALKDYFGIQKELKDSIPILSDILGNWIDEFWDLSLKLHYDGYIMEIIDMEDLKVYENKVSEFIQNCEIVVSY

SEQ ID NO: 42282 - protein, 85 aa, unidentified
  REGION 1..85: note = Description of Unknown:cds_NZ_WFIY01000004.1_cds_WP_205737148.1_1763 target sequence
DKNELIKLRLDNAKFYLSQAKEINSPVIVSELLHKSLTEGFKALKDYFGIQKELKDSIPILSDILGNWIDEFWDLSLKLHYDGYI

SEQ ID NO: 42283 - protein, 85 aa, unidentified
  REGION 1..85: note = Description of Unknown:cds_NZ_WFIY01000004.1_cds_WP_155864322.1_2325 target sequence
LAVVDASVVIKWFAKEQNSEQALLLKEAYAKGLEDLSAPCILPFEVLNGLKYTYNLGEKELKEVSKILSDFQITLYDIESMRDEI

SEQ ID NO: 42284 - protein, 84 aa, unidentified
  REGION 1..84: note = Description of Unknown:cds_NZ_WFIY01000004.1_cds_WP_155864322.1_2325 target sequence
EKELKEVSKILSDFQITLYDIESMRDEIVTISQTYGITMYDSAYVALGKVLGDKVYTADEKLLRKVSDLPFVLHIRDFKIPEKS

SEQ ID NO: 42285 - protein, 85 aa, unidentified
  REGION 1..85: note = Description of Unknown:cds_NZ_WFIY01000004.1_cds_WP_155864322.1_2325 target sequence
AYAKGLEDLSAPCILPFEVLNGLKYTYNLGEKELKEVSKILSDFQITLYDIESMRDEIVTISQTYGITMYDSAYVALGKVLGDKV

SEQ ID NO: 42286 - protein, 85 aa, unidentified
  REGION 1..85: note = Description of Unknown:cds_NZ_WFIY01000004.1_cds_WP_155864334.1_2344 target sequence
IVDTGVIIECINEAGKYHEKVKKLIESNTSLFVTPITLSEVIYVSYRVYRAAGLNDANDYAKEFVEWLLNKLKVTEINHEIVIKA

SEQ ID NO: 42287 - protein, 84 aa, unidentified
  REGION 1..84: note = Description of Unknown:cds_NZ_WFIY01000004.1_cds_WP_155864334.1_2344 target sequence
ANDYAKEFVEWLLNKLKVTEINHEIVIKAGEIKKKYGIALPDCYVIATADYLKDKALFKKEKEIVQALDRIRKELGDIISFIDK

SEQ ID NO: 42288 - protein, 85 aa, unidentified
  REGION 1..85: note = Description of Unknown:cds_NZ_WFIY01000004.1_cds_WP_155864334.1_2344 target sequence
NTSLFVTPITLSEVIYVSYRVYRAAGLNDANDYAKEFVEWLLNKLKVTEINHEIVIKAGEIKKKYGIALPDCYVIATADYLKDKA

SEQ ID NO: 42289 - protein, 85 aa, unidentified
  REGION 1..85: note = Description of Unknown:cds_NC_035460.1_cds_YP_009407968.1_17 target sequence
VLKFVKLSEYAYAPTKESKHAAGFDLKSAYDYEVPANSRILIKTDIAIVLPSGCYGRIAPRSGLSFKHSIDIGAGVIDADYRGNV

SEQ ID NO: 42290 - protein, 84 aa, unidentified
  REGION 1..84: note = Description of Unknown:cds_NC_035460.1_cds_YP_009407968.1_17 target sequence
RIAPRSGLSFKHSIDIGAGVIDADYRGNVGIVFINNSNLLFTVKRGDRVAQLICEKIIYTDIVEESSLDNTDRGDNGFGSTGIN

SEQ ID NO: 42291 - protein, 85 aa, unidentified
  REGION 1..85: note = Description of Unknown:cds_NC_035460.1_cds_YP_009407968.1_17 target sequence
SAYDYEVPANSRILIKTDIAIVLPSGCYGRIAPRSGLSFKHSIDIGAGVIDADYRGNVGIVFINNSNLLFTVKRGDRVAQLICEK

SEQ ID NO: 42292 - protein, 85 aa, unidentified
  REGION 1..85: note = Description of Unknown:cds_NC_029316.1_cds_YP_009230324.1_71 target sequence
KIFLNTNKVSCLMLKTSLFKSKLQQKFVLNQLSRSSFALIAVIKKDNTFELGEPINTTVNGRQVKGIVIGKYSIKSAKFIVKWSG

SEQ ID NO: 42293 - protein, 84 aa, unidentified
  REGION 1..84: note = Description of Unknown:cds_NC_029316.1_cds_YP_009230324.1_71 target sequence
TTVNGRQVKGIVIGKYSIKSAKFIVKWSGFDNVEKWVNFALRENRNRQDLVIYLLRLSAITAVIKQTQSEKKVRKKENEPASKG

SEQ ID NO: 42294 - protein, 85 aa, unidentified
  REGION 1..85: note = Description of Unknown:cds_NC_029316.1_cds_YP_009230324.1_71 target sequence
VLNQLSRSSFALIAVIKKDNTFELGEPINTTVNGRQVKGIVIGKYSIKSAKFIVKWSGFDNVEKWVNFALRENRNRQDLVIYLLR

SEQ ID NO: 42295 - protein, 85 aa, unidentified
  REGION 1..85: note = Description of Unknown:cds_NC_030656.1_cds_YP_009268754.1_39 target sequence
SNFYSSDKYREYCNRQKMAVNILSYYLMKNNDIEPYMMLVNFYNRCNNTELKFYALKSFTNALIFYKESKQNILSNSHIKTVNEW

SEQ ID NO: 42296 - protein, 84 aa, unidentified
  REGION 1..84: note = Description of Unknown:cds_NC_030656.1_cds_YP_009268754.1_39 target sequence
KSFTNALIFYKESKQNILSNSHIKTVNEWQKDVKKFEQVCDKEISKYSCMSRVRKYFYIRRLKCKKDTLSKIILMKIKYNEINA

SEQ ID NO: 42297 - protein, 85 aa, unidentified
  REGION 1..85: note = Description of Unknown:cds_NC_030656.1_cds_YP_009268754.1_39 target sequence
MKNNDIEPYMMLVNFYNRCNNTELKFYALKSFTNALIFYKESKQNILSNSHIKTVNEWQKDVKKFEQVCDKEISKYSCMSRVRKY

SEQ ID NO: 42298 - protein, 85 aa, unidentified
  REGION 1..85: note = Description of Unknown:cds_NC_010495.1_cds_YP_001742081.1_44 target sequence
VKQLDSGIWVFDSGYRGECPKEETDQMGYGTWMQSQFPDVLWFHVPNETGTSSRVQFVLKRQKMGVKSGIGDNVIMTPGANHSCG

SEQ ID NO: 42299 - protein, 84 aa, unidentified
  REGION 1..84: note = Description of Unknown:cds_NC_010495.1_cds_YP_001742081.1_44 target sequence
VLKRQKMGVKSGIGDNVIMTPGANHSCGMIEAKRRDKSKSRVSKEQSVVLTEMCRLGHYAAIAYGIDELKKATLFYFGLPFDVD

SEQ ID NO: 42300 - protein, 85 aa, unidentified
  REGION 1..85: note = Description of Unknown:cds_NC_010495.1_cds_YP_001742081.1_44 target sequence
GYGTWMQSQFPDVLWFHVPNETGTSSRVQFVLKRQKMGVKSGIGDNVIMTPGANHSCGMIEAKRRDKSKSRVSKEQSVVLTEMCR

SEQ ID NO: 42301 - protein, 85 aa, unidentified
  REGION 1..85: note = Description of Unknown:hvTR_Q5GF91 target sequence
SGNSSIMTRSRTRLALSRHHPYQPPATLPRCEETESRASLVEDHPVLPDCDTLSMHNTVIPITEDSPQLLNCEVQMQECPEGFIS

SEQ ID NO: 42302 - protein, 84 aa, unidentified
  REGION 1..84: note = Description of Unknown:hvTR_Q5GF91 target sequence
HNTVIPITEDSPQLLNCEVQMQECPEGFISLTDPRLSRSETVWNVEIKTMSITNSIQMFKAVRGERIVYSMRWEGGGKITTRIL

SEQ ID NO: 42303 - protein, 85 aa, unidentified
  REGION 1..85: note = Description of Unknown:hvTR_Q5GF91 target sequence
LPRCEETESRASLVEDHPVLPDCDTLSMHNTVIPITEDSPQLLNCEVQMQECPEGFISLTDPRLSRSETVWNVEIKTMSITNSIQ

SEQ ID NO: 42304 - protein, 85 aa, unidentified
  REGION 1..85: note = Description of Unknown:hvTR_P06929 target sequence
ATPIRTVRQLSESLCIPYIDVLLPCNFCNYFLSNAEKLLFDHFDLHLVWRDNLVFGCCQGCARTVSLLEFVLYYQESYEVPEIEE

SEQ ID NO: 42305 - protein, 84 aa, unidentified
  REGION 1..84: note = Description of Unknown:hvTR_P06929 target sequence
GCCQGCARTVSLLEFVLYYQESYEVPEIEEILDRPLLQIELRCVTCIKKLSVAEKLEVVSNGERVHRVRNRLKAKCSLCRLYAI

SEQ ID NO: 42306 - protein, 85 aa, unidentified
  REGION 1..85: note = Description of Unknown:hvTR_P06929 target sequence
CNYFLSNAEKLLFDHFDLHLVWRDNLVFGCCQGCARTVSLLEFVLYYQESYEVPEIEEILDRPLLQIELRCVTCIKKLSVAEKLE

SEQ ID NO: 42307 - protein, 85 aa, unidentified
  REGION 1..85: note = Description of Unknown:cds_NZ_WFIY01000004.1_cds_WP_155862396.1_133 target sequence
FEKILVAYDGSEHSKKALDVAIDLAKRYSSEVYVVEAVDETIFETVGVLPPLSAIEEMEKKAKKDIDEAVKKATQNGVKTVGEVL

SEQ ID NO: 42308 - protein, 84 aa, unidentified
  REGION 1..84: note = Description of Unknown:cds_NZ_WFIY01000004.1_cds_WP_155862396.1_133 target sequence
EEMEKKAKKDIDEAVKKATQNGVKTVGEVLSGDPATAILEYANKNDIKLIIVGSRGLSRFKRILLGSVSSRVVQESKIPVMVVK

SEQ ID NO: 42309 - protein, 85 aa, unidentified
  REGION 1..85: note = Description of Unknown:cds_NZ_WFIY01000004.1_cds_WP_155862396.1_133 target sequence
YSSEVYVVEAVDETIFETVGVLPPLSAIEEMEKKAKKDIDEAVKKATQNGVKTVGEVLSGDPATAILEYANKNDIKLIIVGSRGL

SEQ ID NO: 42310 - protein, 85 aa, unidentified
  REGION 1..85: note = Description of Unknown:cds_NZ_WFIY01000004.1_cds_WP_155862752.1_564 target sequence
LEDWEIILKGNRKLRELLQKEAEKRGLSYTEVSTLYFLKSGEKNVSSLAEFVGVNKSTMVEILDRLESEGMITRSRDEKDRRVVL

SEQ ID NO: 42311 - protein, 84 aa, unidentified
  REGION 1..84: note = Description of Unknown:cds_NZ_WFIY01000004.1_cds_WP_155862752.1_564 target sequence
STMVEILDRLESEGMITRSRDEKDRRVVLVKITQKGFEELENVRQAYKNLINDILSRSEGNIIKFFQIVIEEVSLKEKASNAQK

SEQ ID NO: 42312 - protein, 85 aa, unidentified
  REGION 1..85: note = Description of Unknown:cds_NZ_WFIY01000004.1_cds_WP_155862752.1_564 target sequence
SYTEVSTLYFLKSGEKNVSSLAEFVGVNKSTMVEILDRLESEGMITRSRDEKDRRVVLVKITQKGFEELENVRQAYKNLINDILS

SEQ ID NO: 42313 - protein, 85 aa, unidentified
  REGION 1..85: note = Description of Unknown:cds_NZ_WFIY01000004.1_cds_WP_155862823.1_652 target sequence
LHYPDDTPAGYVIYQNGTSKVYDEDGNLLFEVEGVFPPIPSKVNYSWIDTILEKGLPDGRKRFILYVASRYLVNVKNLNEDEALE

SEQ ID NO: 42314 - protein, 84 aa, unidentified
  REGION 1..84: note = Description of Unknown:cds_NZ_WFIY01000004.1_cds_WP_155862823.1_652 target sequence
PDGRKRFILYVASRYLVNVKNLNEDEALEKLKEFYYKTGSGKIYDTWIRSVIKGVKTKGLRPPSLKKLQEKDPELYEEIRRVLG

SEQ ID NO: 42315 - protein, 85 aa, unidentified
  REGION 1..85: note = Description of Unknown:cds_NZ_WFIY01000004.1_cds_WP_155862823.1_652 target sequence
LLFEVEGVFPPIPSKVNYSWIDTILEKGLPDGRKRFILYVASRYLVNVKNLNEDEALEKLKEFYYKTGSGKIYDTWIRSVIKGVK

SEQ ID NO: 42316 - protein, 85 aa, unidentified
  REGION 1..85: note = Description of Unknown:cds_NZ_WFIY01000004.1_cds_WP_155864390.1_896 target sequence
GANKNLGILVDTNILLYVYDGVDPFNLIIEYLDYKPEFYIHKAVFHELEILRSRHSRSPSYMSRINIALIYLEKYKNYWKLIGNE

SEQ ID NO: 42317 - protein, 84 aa, unidentified
  REGION 1..84: note = Description of Unknown:cds_NZ_WFIY01000004.1_cds_WP_155864390.1_896 target sequence
SRSPSYMSRINIALIYLEKYKNYWKLIGNEIDKPTDDILIECAKRNKLLIFTNDKELKQKALKNNVGIIFLTSKGKIIKSLFPI

SEQ ID NO: 42318 - protein, 85 aa, unidentified
  REGION 1..85: note = Description of Unknown:cds_NZ_WFIY01000004.1_cds_WP_155864390.1_896 target sequence
IIEYLDYKPEFYIHKAVFHELEILRSRHSRSPSYMSRINIALIYLEKYKNYWKLIGNEIDKPTDDILIECAKRNKLLIFTNDKEL

SEQ ID NO: 42319 - protein, 85 aa, unidentified
  REGION 1..85: note = Description of Unknown:cds_NZ_WFIY01000004.1_cds_WP_155863249.1_1198 target sequence
TSKVKFLISKTPVTAEKGTKLEDVVKIMASMNIGSVIITDKEKPVGIITERDIIRALAKGIPLTEKIEKVGTMDLITVFEDDSIY

SEQ ID NO: 42320 - protein, 84 aa, unidentified
  REGION 1..84: note = Description of Unknown:cds_NZ_WFIY01000004.1_cds_WP_155863249.1_1198 target sequence
ALAKGIPLTEKIEKVGTMDLITVFEDDSIYTAAEKMNKYNIRHLVVIDKEGNFKGVISIRDLIRESYVLKALANVSQEEWLGSD

SEQ ID NO: 42321 - protein, 85 aa, unidentified
  REGION 1..85: note = Description of Unknown:cds_NZ_WFIY01000004.1_cds_WP_155863249.1_1198 target sequence
MASMNIGSVIITDKEKPVGIITERDIIRALAKGIPLTEKIEKVGTMDLITVFEDDSIYTAAEKMNKYNIRHLVVIDKEGNFKGVI

SEQ ID NO: 42322 - protein, 85 aa, unidentified
  REGION 1..85: note = Description of Unknown:cds_NZ_WFIY01000004.1_cds_WP_155863254.1_1206 target sequence
VNTILSRGDMASQVSRNNPVLIASTIETILLMGAFIAGVTTLLNDQFPIKEAWMAAILSAHLSLALLSGLGAILLFSLTYLSNRK

SEQ ID NO: 42323 - protein, 84 aa, unidentified
  REGION 1..84: note = Description of Unknown:cds_NZ_WFIY01000004.1_cds_WP_155863254.1_1206 target sequence
AILSAHLSLALLSGLGAILLFSLTYLSNRKDLFYFGLITAIFVGLAAAGGLAFYATYNYDFSYLMAISFMIAIISSVGALVYSL

SEQ ID NO: 42324 - protein, 85 aa, unidentified
  REGION 1..85: note = Description of Unknown:cds_NZ_WFIY01000004.1_cds_WP_155863254.1_1206 target sequence
TILLMGAFIAGVTTLLNDQFPIKEAWMAAILSAHLSLALLSGLGAILLFSLTYLSNRKDLFYFGLITAIFVGLAAAGGLAFYATY

SEQ ID NO: 42325 - protein, 85 aa, unidentified
  REGION 1..85: note = Description of Unknown:cds_NZ_WFIY01000004.1_cds_WP_155863811.1_1701 target sequence
SSDYDPELDELLKKKFKQIMNTTKGMQENQKNQEELVAHLDSNTFDNFIKSHKVAVIDFWAEWCAPCIMLAPIIEELAKDYPQVG

SEQ ID NO: 42326 - protein, 84 aa, unidentified
  REGION 1..84: note = Description of Unknown:cds_NZ_WFIY01000004.1_cds_WP_155863811.1_1701 target sequence
VIDFWAEWCAPCIMLAPIIEELAKDYPQVGFGKVNSDENQDIAARYGVMSLPTVIFFKNGEPVDEVIGAVPREEIEIRIKELLK

SEQ ID NO: 42327 - protein, 85 aa, unidentified
  REGION 1..85: note = Description of Unknown:cds_NZ_WFIY01000004.1_cds_WP_155863811.1_1701 target sequence
ENQKNQEELVAHLDSNTFDNFIKSHKVAVIDFWAEWCAPCIMLAPIIEELAKDYPQVGFGKVNSDENQDIAARYGVMSLPTVIFF

SEQ ID NO: 42328 - protein, 85 aa, unidentified
  REGION 1..85: note = Description of Unknown:cds_NZ_WFIY01000004.1_cds_WP_155863861.1_1764 target sequence
KKVSSLLVVILLIFISLSIYSIDKVINSITVQNYSQRPTYYSFVVNGTDYLYVTFPVEHCVKLEFNNSIITYAYAIVIIYPVGIN

SEQ ID NO: 42329 - protein, 84 aa, unidentified
  REGION 1..84: note = Description of Unknown:cds_NZ_WFIY01000004.1_cds_WP_155863861.1_1764 target sequence
PVEHCVKLEFNNSIITYAYAIVIIYPVGINIVLSKNVITLTSQNSTAHIRLHPGLYKVVYFITGCSSKPISQNCISKYVSIKIS

SEQ ID NO: 42330 - protein, 85 aa, unidentified
  REGION 1..85: note = Description of Unknown:cds_NZ_WFIY01000004.1_cds_WP_155863861.1_1764 target sequence
SITVQNYSQRPTYYSFVVNGTDYLYVTFPVEHCVKLEFNNSIITYAYAIVIIYPVGINIVLSKNVITLTSQNSTAHIRLHPGLYK

SEQ ID NO: 42331 - protein, 85 aa, unidentified
  REGION 1..85: note = Description of Unknown:cds_NZ_WFIY01000004.1_cds_WP_155863892.1_1798 target sequence
ETQTIDHIGIVVENIDKAIDFYEKNLGMRLIDKEELKDRGIKVAFMVGKIGESAVELLEPINHDDMNNTVAKFLKTKGPGLHHLA

SEQ ID NO: 42332 - protein, 84 aa, unidentified
  REGION 1..84: note = Description of Unknown:cds_NZ_WFIY01000004.1_cds_WP_155863892.1_1798 target sequence
ELLEPINHDDMNNTVAKFLKTKGPGLHHLAIRVEDINKALEDLSAKGLQLVDKQPRPGARGHLVAFIHPKSVMGVLLELVQEKH

SEQ ID NO: 42333 - protein, 85 aa, unidentified
  REGION 1..85: note = Description of Unknown:cds_NZ_WFIY01000004.1_cds_WP_155863892.1_1798 target sequence
MRLIDKEELKDRGIKVAFMVGKIGESAVELLEPINHDDMNNTVAKFLKTKGPGLHHLAIRVEDINKALEDLSAKGLQLVDKQPRP

SEQ ID NO: 42334 - protein, 85 aa, unidentified
  REGION 1..85: note = Description of Unknown:cds_NZ_WFIY01000004.1_cds_WP_155864005.1_1933 target sequence
VNRIIIGILLMLISISALVFYSQDHYKEIRLNPNDGYTMRINSPITFIYYKICGGNVSLRIVNGSIINTYGADGKYIALVKNNGK

SEQ ID NO: 42335 - protein, 84 aa, unidentified
  REGION 1..84: note = Description of Unknown:cds_NZ_WFIY01000004.1_cds_WP_155864005.1_1933 target sequence
VSLRIVNGSIINTYGADGKYIALVKNNGKGSLLVFLNNDNQSISIIKYTVEALCDSKFYEFLFSVLLFIIGAGVVLVEIRKGRK

SEQ ID NO: 42336 - protein, 85 aa, unidentified
  REGION 1..85: note = Description of Unknown:cds_NZ_WFIY01000004.1_cds_WP_155864005.1_1933 target sequence
EIRLNPNDGYTMRINSPITFIYYKICGGNVSLRIVNGSIINTYGADGKYIALVKNNGKGSLLVFLNNDNQSISIIKYTVEALCDS

SEQ ID NO: 42337 - protein, 85 aa, unidentified
  REGION 1..85: note = Description of Unknown:cds_NC_035460.1_cds_YP_009407994.1_43 target sequence
IELVNIFLETDNGRVKLKVNEYDLEECEACISTNIVHKAVEKLVYVLSSYFFIEESIFYLAIKNNDIFIFKCDKGTISIINNEYF

SEQ ID NO: 42338 - protein, 84 aa, unidentified
  REGION 1..84: note = Description of Unknown:cds_NC_035460.1_cds_YP_009407994.1_43 target sequence
SIFYLAIKNNDIFIFKCDKGTISIINNEYFVFDESLFFTDQYNKITGIEFIVTESMPCKIKPRNNISISATANNHKFYDGLSLH

SEQ ID NO: 42339 - protein, 85 aa, unidentified
  REGION 1..85: note = Description of Unknown:cds_NC_035460.1_cds_YP_009407994.1_43 target sequence
EACISTNIVHKAVEKLVYVLSSYFFIEESIFYLAIKNNDIFIFKCDKGTISIINNEYFVFDESLFFTDQYNKITGIEFIVTESMP

SEQ ID NO: 42340 - protein, 85 aa, unidentified
  REGION 1..85: note = Description of Unknown:cds_NC_003214.2_cds_NP_445712.1_47 target sequence
VRALLFHVITYTKFIVPVVKLLIMSAIAGVIAGAFGGGIGGVGDAIGTIIGDLERAIARFGGSIVNAFKTVIDKILTLAVRIGRI

SEQ ID NO: 42341 - protein, 84 aa, unidentified
  REGION 1..84: note = Description of Unknown:cds_NC_003214.2_cds_NP_445712.1_47 target sequence
AIARFGGSIVNAFKTVIDKILTLAVRIGRIIEKYFRIAVHYIVLFLRLAYRYMYSFYTEFQKDPWRSLQFVGSMAILLNNSLFP

SEQ ID NO: 42342 - protein, 85 aa, unidentified
  REGION 1..85: note = Description of Unknown:cds_NC_003214.2_cds_NP_445712.1_47 target sequence
AGVIAGAFGGGIGGVGDAIGTIIGDLERAIARFGGSIVNAFKTVIDKILTLAVRIGRIIEKYFRIAVHYIVLFLRLAYRYMYSFY

SEQ ID NO: 42343 - protein, 85 aa, unidentified
  REGION 1..85: note = Description of Unknown:cds_NC_029316.1_cds_YP_009230313.1_60 target sequence
ATLKASEKVKAWNKRIVSLLRDVLKQADQNGLLIDLTQLTRALAGLKAYFSFQAKNAKDEKVKEAYKKLIEEVTEIQKQLEPLKK

SEQ ID NO: 42344 - protein, 84 aa, unidentified
  REGION 1..84: note = Description of Unknown:cds_NC_029316.1_cds_YP_009230313.1_60 target sequence
NAKDEKVKEAYKKLIEEVTEIQKQLEPLKKSHKWVKISPELYNKLKSYKEKLENEQIELPYVYFAFEQPQPTTTRKKKQTMLQA

SEQ ID NO: 42345 - protein, 85 aa, unidentified
  REGION 1..85: note = Description of Unknown:cds_NC_029316.1_cds_YP_009230313.1_60 target sequence
DQNGLLIDLTQLTRALAGLKAYFSFQAKNAKDEKVKEAYKKLIEEVTEIQKQLEPLKKSHKWVKISPELYNKLKSYKEKLENEQI

SEQ ID NO: 42346 - protein, 85 aa, unidentified
  REGION 1..85: note = Description of Unknown:cds_NC_005830.1_cds_YP_003750.1_25 target sequence
AKLNRKLRQDSTDRYKTKLYLWRNLGGLIPEDMAISVTESITADWKQYNDMMSKVRNETLDILKTNKVATEDYIGYIAFAEELAH

SEQ ID NO: 42347 - protein, 84 aa, unidentified
  REGION 1..84: note = Description of Unknown:cds_NC_005830.1_cds_YP_003750.1_25 target sequence
RNETLDILKTNKVATEDYIGYIAFAEELAHQVWKNKNSSPDPNTANEASKTDLESKYSDVYGLDVTVLDAIYNAVIPIIMGGGS

SEQ ID NO: 42348 - protein, 85 aa, unidentified
  REGION 1..85: note = Description of Unknown:cds_NC_005830.1_cds_YP_003750.1_25 target sequence
LIPEDMAISVTESITADWKQYNDMMSKVRNETLDILKTNKVATEDYIGYIAFAEELAHQVWKNKNSSPDPNTANEASKTDLESKY

SEQ ID NO: 42349 - protein, 85 aa, unidentified
  REGION 1..85: note = Description of Unknown:hvTR_P0DOE9 target sequence
GSNSLSMIKVRLQNLFDNDEVALLKITCYTDKLIHLTNALAKAVIHTIKLNGIVFVHVITSSDICPNNNIVVKSNFTTMPVLQNG

SEQ ID NO: 42350 - protein, 84 aa, unidentified
  REGION 1..84: note = Description of Unknown:hvTR_P0DOE9 target sequence
FVHVITSSDICPNNNIVVKSNFTTMPVLQNGGYIWEMMELTHCSQPNGLLDDNCEIKFSKKLSDSTMTNYMNQLSELLGFDLNP

SEQ ID NO: 42351 - protein, 85 aa, unidentified
  REGION 1..85: note = Description of Unknown:hvTR_P0DOE9 target sequence
CYTDKLIHLTNALAKAVIHTIKLNGIVFVHVITSSDICPNNNIVVKSNFTTMPVLQNGGYIWEMMELTHCSQPNGLLDDNCEIKF

SEQ ID NO: 42352 - protein, 85 aa, unidentified
  REGION 1..85: note = Description of Unknown:cds_NC_038931.1_cds_YP_009509135.1_19 target sequence
KVLRLGFTDKYIEKQEPIDVVFDKYQPLGYVAVVELPSRIPWIIEIQRREWIERFITMPRDIFRELSFDIIILRRKLEPTPQYRM

SEQ ID NO: 42353 - protein, 84 aa, unidentified
  REGION 1..84: note = Description of Unknown:cds_NC_038931.1_cds_YP_009509135.1_19 target sequence
FITMPRDIFRELSFDIIILRRKLEPTPQYRMIRDIVSDLRQSRGYASGMVILPNGLTYDGDLLEGIEVMEGVDVIAYTLGLIDF

SEQ ID NO: 42354 - protein, 85 aa, unidentified
  REGION 1..85: note = Description of Unknown:cds_NC_038931.1_cds_YP_009509135.1_19 target sequence
LGYVAVVELPSRIPWIIEIQRREWIERFITMPRDIFRELSFDIIILRRKLEPTPQYRMIRDIVSDLRQSRGYASGMVILPNGLTY

SEQ ID NO: 42355 - protein, 85 aa, unidentified
  REGION 1..85: note = Description of Unknown:cds_NZ_WFIY01000004.1_cds_WP_013775684.1_720 target sequence
ESNTDELRKFLENKISNLKKELEYYEYLLSLLESGFSPVKGSKGSIDYIKSRKGEIIAEVYYTPPLMKIIVRRKLTLSKAYINAL

SEQ ID NO: 42356 - protein, 84 aa, unidentified
  REGION 1..84: note = Description of Unknown:cds_NZ_WFIY01000004.1_cds_WP_013775684.1_720 target sequence
EIIAEVYYTPPLMKIIVRRKLTLSKAYINALSKILEDSKNNDKIDYNIVFDKDDLKEISINNVNDDLCYNKIKIALQTILERAS

SEQ ID NO: 42357 - protein, 85 aa, unidentified
  REGION 1..85: note = Description of Unknown:cds_NZ_WFIY01000004.1_cds_WP_013775684.1_720 target sequence
LLSLLESGFSPVKGSKGSIDYIKSRKGEIIAEVYYTPPLMKIIVRRKLTLSKAYINALSKILEDSKNNDKIDYNIVFDKDDLKEI

SEQ ID NO: 42358 - protein, 85 aa, unidentified
  REGION 1..85: note = Description of Unknown:cds_NZ_WFIY01000004.1_cds_WP_152940216.1_730 target sequence
KKFEFFDNTADVGIKAYGRTLEEAFENSALAVFEVMTDTSKVDPVEERKVTIDGIDLENLLYRWIEALLVYYDSELMLFSKFKVK

SEQ ID NO: 42359 - protein, 84 aa, unidentified
  REGION 1..84: note = Description of Unknown:cds_NZ_WFIY01000004.1_cds_WP_152940216.1_730 target sequence
IDLENLLYRWIEALLVYYDSELMLFSKFKVKIDQDNMRLEGEAWGEKFNEEKHERRTLVKAMTYSLMSINKVGDMYEITFVVDI

SEQ ID NO: 42360 - protein, 85 aa, unidentified
  REGION 1..85: note = Description of Unknown:cds_NZ_WFIY01000004.1_cds_WP_152940216.1_730 target sequence
SALAVFEVMTDTSKVDPVEERKVTIDGIDLENLLYRWIEALLVYYDSELMLFSKFKVKIDQDNMRLEGEAWGEKFNEEKHERRTL

SEQ ID NO: 42361 - protein, 85 aa, unidentified
  REGION 1..85: note = Description of Unknown:cds_NZ_WFIY01000004.1_cds_WP_205737135.1_756 target sequence
SEFPAEWQKFKYRGKSLDELINMPMDEFVKLLPSRQRRSLTRGFTPQQRRLLEKIRKMRREGKITKTIKTHVRDLVILPEMVGLK

SEQ ID NO: 42362 - protein, 84 aa, unidentified
  REGION 1..84: note = Description of Unknown:cds_NZ_WFIY01000004.1_cds_WP_205737135.1_756 target sequence
IRKMRREGKITKTIKTHVRDLVILPEMVGLKFGVYNGKEFVEFQVVPEMIGHYLGEFAITTKKVEHGEPGLKATRSSLFLAMKG

SEQ ID NO: 42363 - protein, 85 aa, unidentified
  REGION 1..85: note = Description of Unknown:cds_NZ_WFIY01000004.1_cds_WP_205737135.1_756 target sequence
FVKLLPSRQRRSLTRGFTPQQRRLLEKIRKMRREGKITKTIKTHVRDLVILPEMVGLKFGVYNGKEFVEFQVVPEMIGHYLGEFA

SEQ ID NO: 42364 - protein, 85 aa, unidentified
  REGION 1..85: note = Description of Unknown:cds_NZ_WFIY01000004.1_cds_WP_155863054.1_952 target sequence
SEQQANKIIITSARRKMARAQCQLTEGKGRVFVNGVPIELIPIEMIRLKIMEPLLLAGESLASKIDAKIYTFGGGIMGQADAARM

SEQ ID NO: 42365 - protein, 84 aa, unidentified
  REGION 1..84: note = Description of Unknown:cds_NZ_WFIY01000004.1_cds_WP_155863054.1_952 target sequence
LLAGESLASKIDAKIYTFGGGIMGQADAARMALARALVKFSGSKELEELYKQYDRTMLAGDPRETESEKWMRYSARRWRQKAYR

SEQ ID NO: 42366 - protein, 85 aa, unidentified
  REGION 1..85: note = Description of Unknown:cds_NZ_WFIY01000004.1_cds_WP_155863054.1_952 target sequence
KGRVFVNGVPIELIPIEMIRLKIMEPLLLAGESLASKIDAKIYTFGGGIMGQADAARMALARALVKFSGSKELEELYKQYDRTML

SEQ ID NO: 42367 - protein, 85 aa, unidentified
  REGION 1..85: note = Description of Unknown:cds_NZ_WFIY01000004.1_cds_WP_155863138.1_1059 target sequence
YKVIFKVTKGSASNLSQTLRKIGFIPIYRKIQGDYDMYMTLFKGNNLAEVKEAISEAAFYFAKEGKFGRQDFATIYEVDDKYLGK

SEQ ID NO: 42368 - protein, 84 aa, unidentified
  REGION 1..84: note = Description of Unknown:cds_NZ_WFIY01000004.1_cds_WP_155863138.1_1059 target sequence
SEAAFYFAKEGKFGRQDFATIYEVDDKYLGKGIGSLLGAGLGYKLAGLPGLILGLLGGVIIGELADITMGEKFVGVMEWPKLSY

SEQ ID NO: 42369 - protein, 85 aa, unidentified
  REGION 1..85: note = Description of Unknown:cds_NZ_WFIY01000004.1_cds_WP_155863138.1_1059 target sequence
YRKIQGDYDMYMTLFKGNNLAEVKEAISEAAFYFAKEGKFGRQDFATIYEVDDKYLGKGIGSLLGAGLGYKLAGLPGLILGLLGG

SEQ ID NO: 42370 - protein, 85 aa, unidentified
  REGION 1..85: note = Description of Unknown:cds_NZ_WFIY01000004.1_cds_WP_155863255.1_1207 target sequence
SSRILNMYENVSSLLSRNYYTPALALGELLSLIITYVAGMEIAVYKLPLSGYPITAHIYAAAIDTVLAISLYGSTTRSNNLILRI

SEQ ID NO: 42371 - protein, 84 aa, unidentified
  REGION 1..84: note = Description of Unknown:cds_NZ_WFIY01000004.1_cds_WP_155863255.1_1207 target sequence
TAHIYAAAIDTVLAISLYGSTTRSNNLILRILAVLDILSVLGAAFEGLFYFGGFSTPCYAIGMGTGFVFTIAFTSALFFYSLRR

SEQ ID NO: 42372 - protein, 85 aa, unidentified
  REGION 1..85: note = Description of Unknown:cds_NZ_WFIY01000004.1_cds_WP_155863255.1_1207 target sequence
ELLSLIITYVAGMEIAVYKLPLSGYPITAHIYAAAIDTVLAISLYGSTTRSNNLILRILAVLDILSVLGAAFEGLFYFGGFSTPC

SEQ ID NO: 42373 - protein, 85 aa, unidentified
  REGION 1..85: note = Description of Unknown:cds_NZ_WFIY01000004.1_cds_WP_155863496.1_1446 target sequence
PIRDEQTYAKMSYNDFKVAFERLKRGELKLSAWRAYKSLRRMLQSLAMKYDLHRKDTPCAVPKNCMIRVAEELEKYYNGITEMTK

SEQ ID NO: 42374 - protein, 84 aa, unidentified
  REGION 1..84: note = Description of Unknown:cds_NZ_WFIY01000004.1_cds_WP_155863496.1_1446 target sequence
KDTPCAVPKNCMIRVAEELEKYYNGITEMTKEALRLFDEWKENDARKEDIIKLLKELRFEWISSHLTKEEINEIEEIKKELENL

SEQ ID NO: 42375 - protein, 85 aa, unidentified
  REGION 1..85: note = Description of Unknown:cds_NZ_WFIY01000004.1_cds_WP_155863496.1_1446 target sequence
LKLSAWRAYKSLRRMLQSLAMKYDLHRKDTPCAVPKNCMIRVAEELEKYYNGITEMTKEALRLFDEWKENDARKEDIIKLLKELR

SEQ ID NO: 42376 - protein, 85 aa, unidentified
  REGION 1..85: note = Description of Unknown:cds_NZ_WFIY01000004.1_cds_WP_155863500.1_1454 target sequence
KLIDEIENEHGTNVLTILSDPFFLFPSMLKATNVEKIDNKYKVEIPIKGIFYLPFNLIIYVTRYTSINSVNYVVNVADFAEHRWG

SEQ ID NO: 42377 - protein, 84 aa, unidentified
  REGION 1..84: note = Description of Unknown:cds_NZ_WFIY01000004.1_cds_WP_155863500.1_1454 target sequence
FNLIIYVTRYTSINSVNYVVNVADFAEHRWGNIWFDIEDKKIKLNLDISLPLDFINSKILEKRVKEFKEKFNELIRIERIKRKI

SEQ ID NO: 42378 - protein, 85 aa, unidentified
  REGION 1..85: note = Description of Unknown:cds_NZ_WFIY01000004.1_cds_WP_155863500.1_1454 target sequence
MLKATNVEKIDNKYKVEIPIKGIFYLPFNLIIYVTRYTSINSVNYVVNVADFAEHRWGNIWFDIEDKKIKLNLDISLPLDFINSK

SEQ ID NO: 42379 - protein, 85 aa, unidentified
  REGION 1..85: note = Description of Unknown:cds_NZ_WFIY01000004.1_cds_WP_155863887.1_1793 target sequence
RYQGSIEVNAKKEVILNFLGNIELVASCFPGIKDVKKDGDAYIVKGTAGIGFIKGDYTAKVKMQRTNEGFDLEAQGTGMNSNVNI

SEQ ID NO: 42380 - protein, 84 aa, unidentified
  REGION 1..84: note = Description of Unknown:cds_NZ_WFIY01000004.1_cds_WP_155863887.1_1793 target sequence
GDYTAKVKMQRTNEGFDLEAQGTGMNSNVNINAKIVVEDGRINYTADVNVSGILASAGARLMEPALNKILNQLFDCIKKKVEIS

SEQ ID NO: 42381 - protein, 85 aa, unidentified
  REGION 1..85: note = Description of Unknown:cds_NZ_WFIY01000004.1_cds_WP_155863887.1_1793 target sequence
CFPGIKDVKKDGDAYIVKGTAGIGFIKGDYTAKVKMQRTNEGFDLEAQGTGMNSNVNINAKIVVEDGRINYTADVNVSGILASAG

SEQ ID NO: 42382 - protein, 85 aa, unidentified
  REGION 1..85: note = Description of Unknown:cds_NZ_WFIY01000004.1_cds_WP_155863888.1_1794 target sequence
SIITGEEKIINKDKAIQFLSNYENLLKCTPGISKINDKEFSASVKVGPLTVEVQGTIVEHKVEDNKVFDKIEVKGPGIIVTIITV

SEQ ID NO: 42383 - protein, 84 aa, unidentified
  REGION 1..84: note = Description of Unknown:cds_NZ_WFIY01000004.1_cds_WP_155863888.1_1794 target sequence
GTIVEHKVEDNKVFDKIEVKGPGIIVTIITVVTIEDHKLSWEAEYELSGSLAKALGNTIAKQAKELTKQIISCSVSAINSSNNS

SEQ ID NO: 42384 - protein, 85 aa, unidentified
  REGION 1..85: note = Description of Unknown:cds_NZ_WFIY01000004.1_cds_WP_155863888.1_1794 target sequence
CTPGISKINDKEFSASVKVGPLTVEVQGTIVEHKVEDNKVFDKIEVKGPGIIVTIITVVTIEDHKLSWEAEYELSGSLAKALGNT

SEQ ID NO: 42385 - protein, 85 aa, unidentified
  REGION 1..85: note = Description of Unknown:cds_NZ_WFIY01000004.1_cds_WP_155864108.1_2058 target sequence
NSYLFAINGSSLHTLLLSIDEEKSGDTTYFVYSGFLIENEEFSLPLLNYYNLPAFSTAYYIASSRKKAYTLLERHYYEGAVPLYL

SEQ ID NO: 42386 - protein, 84 aa, unidentified
  REGION 1..84: note = Description of Unknown:cds_NZ_WFIY01000004.1_cds_WP_155864108.1_2058 target sequence
FSTAYYIASSRKKAYTLLERHYYEGAVPLYLIFRTNDEKKAMEKALKTFKDTLLMMGLGLIFKLPSSYLELLSADYVKLLKKWF

SEQ ID NO: 42387 - protein, 85 aa, unidentified
  REGION 1..85: note = Description of Unknown:cds_NZ_WFIY01000004.1_cds_WP_155864108.1_2058 target sequence
TYFVYSGFLIENEEFSLPLLNYYNLPAFSTAYYIASSRKKAYTLLERHYYEGAVPLYLIFRTNDEKKAMEKALKTFKDTLLMMGL

SEQ ID NO: 42388 - protein, 85 aa, unidentified
  REGION 1..85: note = Description of Unknown:cds_NZ_WFIY01000004.1_cds_WP_155864299.1_2293 target sequence
FKRILVGFDGSKESLKALILAINLAKFHGASIKALEVIEHMPVILEAYIKEDMLRDRERIIKHTEIIKRISIENGINIDYEVVRG

SEQ ID NO: 42389 - protein, 84 aa, unidentified
  REGION 1..84: note = Description of Unknown:cds_NZ_WFIY01000004.1_cds_WP_155864299.1_2293 target sequence
RDRERIIKHTEIIKRISIENGINIDYEVVRGDPAVVLSKYAESEDFDLIILGKRKLKGLKKLFMESVSSKVLDISKKPVLVVKE

SEQ ID NO: 42390 - protein, 85 aa, unidentified
  REGION 1..85: note = Description of Unknown:cds_NZ_WFIY01000004.1_cds_WP_155864299.1_2293 target sequence
HGASIKALEVIEHMPVILEAYIKEDMLRDRERIIKHTEIIKRISIENGINIDYEVVRGDPAVVLSKYAESEDFDLIILGKRKLKG

SEQ ID NO: 42391 - protein, 85 aa, unidentified
  REGION 1..85: note = Description of Unknown:cds_NC_003214.2_cds_NP_445668.1_3 target sequence
GGVKHLNEHEETLLLNELIKRGFKIYVKTRMGKKEVVSIKAEKGLVITRTSDGMEIIEAPKNFQRREFIIKPRYPEPNPVAGSSE

SEQ ID NO: 42392 - protein, 84 aa, unidentified
  REGION 1..84: note = Description of Unknown:cds_NC_003214.2_cds_NP_445668.1_3 target sequence
EIIEAPKNFQRREFIIKPRYPEPNPVAGSSEIYKLLSTKKEIIYREEKVTRVELVNNNLILETDKGHIYILTPSSLFEYPIYTW

SEQ ID NO: 42393 - protein, 85 aa, unidentified
  REGION 1..85: note = Description of Unknown:cds_NC_003214.2_cds_NP_445668.1_3 target sequence
KTRMGKKEVVSIKAEKGLVITRTSDGMEIIEAPKNFQRREFIIKPRYPEPNPVAGSSEIYKLLSTKKEIIYREEKVTRVELVNNN

SEQ ID NO: 42394 - protein, 85 aa, unidentified
  REGION 1..85: note = Description of Unknown:cds_NC_029316.1_cds_YP_009230335.1_82 target sequence
LLVKRYTQGLGMKVEDLTGKGQTGKVTVKEVLWFDTEESYGFNNVPSAVVVYKIENNDDNLLFGDFYIATFDDGANERVWGVGDT

SEQ ID NO: 42395 - protein, 84 aa, unidentified
  REGION 1..84: note = Description of Unknown:cds_NC_029316.1_cds_YP_009230335.1_82 target sequence
NNDDNLLFGDFYIATFDDGANERVWGVGDTADDALEDAERNWDRMIEKYGCDEEEGECNNPFREALEKLKEMYNQNPSLMRNYL

SEQ ID NO: 42396 - protein, 85 aa, unidentified
  REGION 1..85: note = Description of Unknown:cds_NC_029316.1_cds_YP_009230335.1_82 target sequence
VKEVLWFDTEESYGFNNVPSAVVVYKIENNDDNLLFGDFYIATFDDGANERVWGVGDTADDALEDAERNWDRMIEKYGCDEEEGE

SEQ ID NO: 42397 - protein, 85 aa, unidentified
  REGION 1..85: note = Description of Unknown:cds_NC_010495.1_cds_YP_001742086.1_49 target sequence
SEVKRYDLVGYMDGNCNLKEARMELSDDGVYVKHKDYAALEAKCAALAAENAWLKKFCKYAAFDADCEAEPGMERGGFSDALNDI

SEQ ID NO: 42398 - protein, 84 aa, unidentified
  REGION 1..84: note = Description of Unknown:cds_NC_010495.1_cds_YP_001742086.1_49 target sequence
KKFCKYAAFDADCEAEPGMERGGFSDALNDIKTPATDAFLAEVRAHGVEMAMEHMQSSGSLTFGDCYILLNKFAAQLRKGVEQK

SEQ ID NO: 42399 - protein, 85 aa, unidentified
  REGION 1..85: note = Description of Unknown:cds_NC_010495.1_cds_YP_001742086.1_49 target sequence
DGVYVKHKDYAALEAKCAALAAENAWLKKFCKYAAFDADCEAEPGMERGGFSDALNDIKTPATDAFLAEVRAHGVEMAMEHMQSS

SEQ ID NO: 42400 - protein, 85 aa, unidentified
  REGION 1..85: note = Description of Unknown:cds_NZ_WFIY01000004.1_cds_WP_155862513.1_273 target sequence
KKSDIAIIIFIAFVYILFFTNIITTASVEGVSMYPVFQNGALTFYGPPENIQYHNVIIYKSPEYGIYVIHRVVGIDGNHYITQGV

SEQ ID NO: 42401 - protein, 84 aa, unidentified
  REGION 1..84: note = Description of Unknown:cds_NZ_WFIY01000004.1_cds_WP_155862513.1_273 target sequence
HNVIIYKSPEYGIYVIHRVVGIDGNHYITQGVDNISNPYPDNRIGLEPPQGIPSTDVIGKVTEVNGYIISVPYLGYLSILFSYL

SEQ ID NO: 42402 - protein, 85 aa, unidentified
  REGION 1..85: note = Description of Unknown:cds_NZ_WFIY01000004.1_cds_WP_155862513.1_273 target sequence
VEGVSMYPVFQNGALTFYGPPENIQYHNVIIYKSPEYGIYVIHRVVGIDGNHYITQGVDNISNPYPDNRIGLEPPQGIPSTDVIG

SEQ ID NO: 42403 - protein, 85 aa, unidentified
  REGION 1..85: note = Description of Unknown:cds_NZ_WFIY01000004.1_cds_WP_155862900.1_750 target sequence
SEKLQVLGSRKALTPGLQHYSRVVVADNSGAKEAMIIGVFGYRGVLRRVPFANIADLVVVSVKKGTPEVRKQKFRAVIVRQRMPF

SEQ ID NO: 42404 - protein, 84 aa, unidentified
  REGION 1..84: note = Description of Unknown:cds_NZ_WFIY01000004.1_cds_WP_155862900.1_750 target sequence
IADLVVVSVKKGTPEVRKQKFRAVIVRQRMPFRRPDGTWVAFEDNAVVIVNPDGTPKGTEIRGPIAREAAERWPKVASLATMVV

SEQ ID NO: 42405 - protein, 85 aa, unidentified
  REGION 1..85: note = Description of Unknown:cds_NZ_WFIY01000004.1_cds_WP_155862900.1_750 target sequence
NSGAKEAMIIGVFGYRGVLRRVPFANIADLVVVSVKKGTPEVRKQKFRAVIVRQRMPFRRPDGTWVAFEDNAVVIVNPDGTPKGT

SEQ ID NO: 42406 - protein, 85 aa, unidentified
  REGION 1..85: note = Description of Unknown:cds_NZ_WFIY01000004.1_cds_WP_155863137.1_1058 target sequence
AETKLLKLLGNRVTSGILGLSLLVSSLYLVISIKVNFYDLLYETLVYFNPYFLYVIGIPLGLERLIYGITGNKKFSDFFFGRTEF

SEQ ID NO: 42407 - protein, 84 aa, unidentified
  REGION 1..84: note = Description of Unknown:cds_NZ_WFIY01000004.1_cds_WP_155863137.1_1058 target sequence
YVIGIPLGLERLIYGITGNKKFSDFFFGRTEFTAMYLYFLSLFGIIMGIFIVIYSIALTGILVRTMDIIDGVSFILFGISLVAL

SEQ ID NO: 42408 - protein, 85 aa, unidentified
  REGION 1..85: note = Description of Unknown:cds_NZ_WFIY01000004.1_cds_WP_155863137.1_1058 target sequence
YLVISIKVNFYDLLYETLVYFNPYFLYVIGIPLGLERLIYGITGNKKFSDFFFGRTEFTAMYLYFLSLFGIIMGIFIVIYSIALT

SEQ ID NO: 42409 - protein, 85 aa, unidentified
  REGION 1..85: note = Description of Unknown:cds_NZ_WFIY01000004.1_cds_WP_155863903.1_1811 target sequence
NSSALASEFLLRGTRTLKEATEAYNEGDLYYTLVRLDETLNNLASVILSLYGVYSVDGDSVNALSYLEETRDLDPSLKSLIKEIQ

SEQ ID NO: 42410 - protein, 84 aa, unidentified
  REGION 1..84: note = Description of Unknown:cds_NZ_WFIY01000004.1_cds_WP_155863903.1_1811 target sequence
YSVDGDSVNALSYLEETRDLDPSLKSLIKEIQDLDRQLSITNFIDESSLKSPSVVVRNAEVKTTLDRITKIFDKVQEVFDEFHS

SEQ ID NO: 42411 - protein, 85 aa, unidentified
  REGION 1..85: note = Description of Unknown:cds_NZ_WFIY01000004.1_cds_WP_155863903.1_1811 target sequence
DLYYTLVRLDETLNNLASVILSLYGVYSVDGDSVNALSYLEETRDLDPSLKSLIKEIQDLDRQLSITNFIDESSLKSPSVVVRNA

SEQ ID NO: 42412 - protein, 85 aa, unidentified
  REGION 1..85: note = Description of Unknown:cds_NZ_WFIY01000004.1_cds_WP_155863994.1_1919 target sequence
TVNSRSILKDEKERVINIAFFLKKFMTGKEKFSSLDDLVKFIDSLAKKFEFLSTVKNWEKWKLELLLKKVNFVARSIRKEKKLKV

SEQ ID NO: 42413 - protein, 84 aa, unidentified
  REGION 1..84: note = Description of Unknown:cds_NZ_WFIY01000004.1_cds_WP_155863994.1_1919 target sequence
TVKNWEKWKLELLLKKVNFVARSIRKEKKLKVSLERKFKGIKIQKVEEYDADKFTVFYVYEGKSKAVSGSAREIKQKLLKEIKK

SEQ ID NO: 42414 - protein, 85 aa, unidentified
  REGION 1..85: note = Description of Unknown:cds_NZ_WFIY01000004.1_cds_WP_155863994.1_1919 target sequence
GKEKFSSLDDLVKFIDSLAKKFEFLSTVKNWEKWKLELLLKKVNFVARSIRKEKKLKVSLERKFKGIKIQKVEEYDADKFTVFYV

SEQ ID NO: 42415 - protein, 85 aa, unidentified
  REGION 1..85: note = Description of Unknown:cds_NZ_WFIY01000004.1_cds_WP_155864472.1_1982 target sequence
FSKFYLVKAPLAVRVHTKKGDKLFLYGQVIIWLIYVLINVGLFINKLLLFGTITLALGIILITLVIKSYSYLNVRITPERVEIGK

SEQ ID NO: 42416 - protein, 84 aa, unidentified
  REGION 1..84: note = Description of Unknown:cds_NZ_WFIY01000004.1_cds_WP_155864472.1_1982 target sequence
TLALGIILITLVIKSYSYLNVRITPERVEIGKWKISLDQVREIKVLRQNGPTADLIIVYEGGERTIEEVKNWKEVLETFQRYIV

SEQ ID NO: 42417 - protein, 85 aa, unidentified
  REGION 1..85: note = Description of Unknown:cds_NZ_WFIY01000004.1_cds_WP_155864472.1_1982 target sequence
QVIIWLIYVLINVGLFINKLLLFGTITLALGIILITLVIKSYSYLNVRITPERVEIGKWKISLDQVREIKVLRQNGPTADLIIVY

SEQ ID NO: 42418 - protein, 85 aa, unidentified
  REGION 1..85: note = Description of Unknown:cds_NZ_WFIY01000004.1_cds_WP_155864106.1_2055 target sequence
KVCPRCGHLNPDNAYVCEKCGYYLGFESVPHIMPSTPITPPEKPLVKVCPVCGYINPGDAMKCQRCGYVFQQPQVIVCPRCGSEN

SEQ ID NO: 42419 - protein, 84 aa, unidentified
  REGION 1..84: note = Description of Unknown:cds_NZ_WFIY01000004.1_cds_WP_155864106.1_2055 target sequence
YINPGDAMKCQRCGYVFQQPQVIVCPRCGSENPINATHCLRCGYPFKQSVPQTIVQRRKFPTIPVLASVIIAYIMIIILVYLLG

SEQ ID NO: 42420 - protein, 85 aa, unidentified
  REGION 1..85: note = Description of Unknown:cds_NZ_WFIY01000004.1_cds_WP_155864106.1_2055 target sequence
SVPHIMPSTPITPPEKPLVKVCPVCGYINPGDAMKCQRCGYVFQQPQVIVCPRCGSENPINATHCLRCGYPFKQSVPQTIVQRRK

SEQ ID NO: 42421 - protein, 85 aa, unidentified
  REGION 1..85: note = Description of Unknown:cds_NZ_WFIY01000004.1_cds_WP_048054718.1_2235 target sequence
LGSKKLSIIVFSGTIDKLMPVGILTSGAAAAGYEVNLFFTFWGLQALTKKSIGQPQPIDKNYEQFGPVMMQRMQEMKYPTWDQLI

SEQ ID NO: 42422 - protein, 84 aa, unidentified
  REGION 1..84: note = Description of Unknown:cds_NZ_WFIY01000004.1_cds_WP_048054718.1_2235 target sequence
PQPIDKNYEQFGPVMMQRMQEMKYPTWDQLIMQAKEVGEVKVYACSTTMEFFGLKREDLADFVDDVVGVATFLDRAEGGTTLFI

SEQ ID NO: 42423 - protein, 85 aa, unidentified
  REGION 1..85: note = Description of Unknown:cds_NZ_WFIY01000004.1_cds_WP_048054718.1_2235 target sequence
AAAAGYEVNLFFTFWGLQALTKKSIGQPQPIDKNYEQFGPVMMQRMQEMKYPTWDQLIMQAKEVGEVKVYACSTTMEFFGLKRED

SEQ ID NO: 42424 - protein, 85 aa, unidentified
  REGION 1..85: note = Description of Unknown:cds_NZ_WFIY01000004.1_cds_WP_155864258.1_2249 target sequence
NISGFEFPEELLYDEEKHVWIKKEENNVISIGITSLGQYMAGKIFQVSTKEVGEKVTPRSTLFSIESAKWVGKFRLPITGEIIAV

SEQ ID NO: 42425 - protein, 84 aa, unidentified
  REGION 1..84: note = Description of Unknown:cds_NZ_WFIY01000004.1_cds_WP_155864258.1_2249 target sequence
EKVTPRSTLFSIESAKWVGKFRLPITGEIIAVNENVIKDPSIINEKPYDAWIIKVKVEKIDERKFKTINEVYEKFKEEAEKVVK

SEQ ID NO: 42426 - protein, 85 aa, unidentified
  REGION 1..85: note = Description of Unknown:cds_NZ_WFIY01000004.1_cds_WP_155864258.1_2249 target sequence
VISIGITSLGQYMAGKIFQVSTKEVGEKVTPRSTLFSIESAKWVGKFRLPITGEIIAVNENVIKDPSIINEKPYDAWIIKVKVEK

SEQ ID NO: 42427 - protein, 85 aa, unidentified
  REGION 1..85: note = Description of Unknown:cds_NC_035460.1_cds_YP_009408076.1_125 target sequence
GPLSIFFMILATVALCVILIQCYTIYENYDNIKEFNATHGALEYSKSTNVISVDRREFDVNDQIYDVKEKWRCVKYNDMFVSVSK

SEQ ID NO: 42428 - protein, 84 aa, unidentified
  REGION 1..84: note = Description of Unknown:cds_NC_035460.1_cds_YP_009408076.1_125 target sequence
DRREFDVNDQIYDVKEKWRCVKYNDMFVSVSKFGFKANNGNIRKFSNFKDCLNYTFTTSTHSDIINPCINNQADNDCIFLKSIL

SEQ ID NO: 42429 - protein, 85 aa, unidentified
  REGION 1..85: note = Description of Unknown:cds_NC_035460.1_cds_YP_009408076.1_125 target sequence
NYDNIKEFNATHGALEYSKSTNVISVDRREFDVNDQIYDVKEKWRCVKYNDMFVSVSKFGFKANNGNIRKFSNFKDCLNYTFTTS

SEQ ID NO: 42430 - protein, 85 aa, unidentified
  REGION 1..85: note = Description of Unknown:cds_NC_029316.1_cds_YP_009230278.1_25 target sequence
KNNGVELLIILPRNNCTIKKNKYLSYVIKDNKCYVYLVYSNKYYLTTSLPSNLILNGREATKILHHMLNKSDEELYNAILSSGDT

SEQ ID NO: 42431 - protein, 84 aa, unidentified
  REGION 1..84: note = Description of Unknown:cds_NC_029316.1_cds_YP_009230278.1_25 target sequence
ILNGREATKILHHMLNKSDEELYNAILSSGDTASKKTYRINLTVSPIVAPKLFKLAFMFNVKISTIIRMLILSYYRSTTIKLAP

SEQ ID NO: 42432 - protein, 85 aa, unidentified
  REGION 1..85: note = Description of Unknown:cds_NC_029316.1_cds_YP_009230278.1_25 target sequence
IKDNKCYVYLVYSNKYYLTTSLPSNLILNGREATKILHHMLNKSDEELYNAILSSGDTASKKTYRINLTVSPIVAPKLFKLAFMF

SEQ ID NO: 42433 - protein, 85 aa, unidentified
  REGION 1..85: note = Description of Unknown:cds_NC_030656.1_cds_YP_009268759.1_44 target sequence
EIINIFLDTESGKIKFSSPAFTCGECTRVNYIKNTINTFLDELDKYIDVDKSDFYIAIKDKDIFYFHCVNGTTSMVNNEFYIFNH

SEQ ID NO: 42434 - protein, 84 aa, unidentified
  REGION 1..84: note = Description of Unknown:cds_NC_030656.1_cds_YP_009268759.1_44 target sequence
FYIAIKDKDIFYFHCVNGTTSMVNNEFYIFNHGLLVSDSEKKETDDVQSVVFVITDTLPATVFPRKNVSVTFYSCNNKFDVTSL

SEQ ID NO: 42435 - protein, 85 aa, unidentified
  REGION 1..85: note = Description of Unknown:cds_NC_030656.1_cds_YP_009268759.1_44 target sequence
RVNYIKNTINTFLDELDKYIDVDKSDFYIAIKDKDIFYFHCVNGTTSMVNNEFYIFNHGLLVSDSEKKETDDVQSVVFVITDTLP

SEQ ID NO: 42436 - protein, 85 aa, unidentified
  REGION 1..85: note = Description of Unknown:vpeps_3RJ2_1 target sequence
GWAIVANCEFVNATGKKTTILVNENWAKYCWIWTYKFPEKYTLLRYSVDGEMFMRHRVTFFNATGRYITHTHLNHGLEDVLEGSL

SEQ ID NO: 42437 - protein, 85 aa, unidentified
  REGION 1..85: note = Description of Unknown:vpeps_3RJ2_1 target sequence
FMRHRVTFFNATGRYITHTHLNHGLEDVLEGSLAVPKDAAYARIHAAINVSLTNPGDVHMHYDETEGEQIRSYDAAEFARTLAAV

SEQ ID NO: 42438 - protein, 85 aa, unidentified
  REGION 1..85: note = Description of Unknown:vpeps_3RJ2_1 target sequence
KYCWIWTYKFPEKYTLLRYSVDGEMFMRHRVTFFNATGRYITHTHLNHGLEDVLEGSLAVPKDAAYARIHAAINVSLTNPGDVHM

SEQ ID NO: 42439 - protein, 85 aa, unidentified
  REGION 1..85: note = Description of Unknown:vpeps_4P9C_1 target sequence
GSHMKPEIKEAYMKTAELFSQVSNCKRMKVGAIVVKNGSILAHGWNGTPSGFHTNCCELEDGSTNPFVLHAEQNALVKMAKSSES

SEQ ID NO: 42440 - protein, 85 aa, unidentified
  REGION 1..85: note = Description of Unknown:vpeps_4P9C_1 target sequence
TNCCELEDGSTNPFVLHAEQNALVKMAKSSESIDGSELFCTHSPCPDCSKMIAQAGVKKVYYRNEYRITDGIDVLQQLGVEVEKM

SEQ ID NO: 42441 - protein, 85 aa, unidentified
  REGION 1..85: note = Description of Unknown:vpeps_4P9C_1 target sequence
MKVGAIVVKNGSILAHGWNGTPSGFHTNCCELEDGSTNPFVLHAEQNALVKMAKSSESIDGSELFCTHSPCPDCSKMIAQAGVKK

SEQ ID NO: 42442 - protein, 85 aa, unidentified
  REGION 1..85: note = Description of Unknown:cds_NZ_WFIY01000004.1_cds_WP_155862794.1_614 target sequence
KGSIAGLIIVVIILAVVYYLYTEGYFYSVDIDGVYVTIDSNFLGIKSSLHVSYSNTTISAHGDQDITLKIYLYNNNPLLSVKVTN

SEQ ID NO: 42443 - protein, 84 aa, unidentified
  REGION 1..84: note = Description of Unknown:cds_NZ_WFIY01000004.1_cds_WP_155862794.1_614 target sequence
YSNTTISAHGDQDITLKIYLYNNNPLLSVKVTNVSVSHPFTLISAAPVPSEISPHNNETLCIVIKTPMCNYAGAVDIIIYATEG

SEQ ID NO: 42444 - protein, 85 aa, unidentified
  REGION 1..85: note = Description of Unknown:cds_NZ_WFIY01000004.1_cds_WP_155862794.1_614 target sequence
SVDIDGVYVTIDSNFLGIKSSLHVSYSNTTISAHGDQDITLKIYLYNNNPLLSVKVTNVSVSHPFTLISAAPVPSEISPHNNETL

SEQ ID NO: 42445 - protein, 85 aa, unidentified
  REGION 1..85: note = Description of Unknown:cds_NZ_WFIY01000004.1_cds_WP_155863341.1_1308 target sequence
ITFSVGRKFDVSPQAVWSIVKDVNSIPKYWKGTRELHVDKIAEGVYEGTVRFAFPSKGRIRLIIDDENRKLTFNYLSGPIKGYNI

SEQ ID NO: 42446 - protein, 84 aa, unidentified
  REGION 1..84: note = Description of Unknown:cds_NZ_WFIY01000004.1_cds_WP_155863341.1_1308 target sequence
AFPSKGRIRLIIDDENRKLTFNYLSGPIKGYNIVEVKENEIISTWRVKMSLLLTLAESWNAKHFKQGTEHALERIISEAKFGIP

SEQ ID NO: 42447 - protein, 85 aa, unidentified
  REGION 1..85: note = Description of Unknown:cds_NZ_WFIY01000004.1_cds_WP_155863341.1_1308 target sequence
KYWKGTRELHVDKIAEGVYEGTVRFAFPSKGRIRLIIDDENRKLTFNYLSGPIKGYNIVEVKENEIISTWRVKMSLLLTLAESWN

SEQ ID NO: 42448 - protein, 85 aa, unidentified
  REGION 1..85: note = Description of Unknown:cds_NZ_WFIY01000004.1_cds_WP_155864184.1_2143 target sequence
VNLKLLTALLALTLVLNVILGFELYEALHPSSISSVMPSSSTHLYSFSFKTKFHFHVKEPGEYEVELKVKEGVFNQLYVILYFKD

SEQ ID NO: 42449 - protein, 84 aa, unidentified
  REGION 1..84: note = Description of Unknown:cds_NZ_WFIY01000004.1_cds_WP_155864184.1_2143 target sequence
HFHVKEPGEYEVELKVKEGVFNQLYVILYFKDGESVTLSLNNTTANVEFEHKEEEVVAYVSGTAYSNMTEQEILKNIQICLLQS

SEQ ID NO: 42450 - protein, 85 aa, unidentified
  REGION 1..85: note = Description of Unknown:cds_NZ_WFIY01000004.1_cds_WP_155864184.1_2143 target sequence
LHPSSISSVMPSSSTHLYSFSFKTKFHFHVKEPGEYEVELKVKEGVFNQLYVILYFKDGESVTLSLNNTTANVEFEHKEEEVVAY

SEQ ID NO: 42451 - protein, 85 aa, unidentified
  REGION 1..85: note = Description of Unknown:cds_NZ_WFIY01000004.1_cds_WP_155864189.1_2149 target sequence
QSGEKSFKIDKNSFNNIAIPVEIYTSFEAEIDGKKYIGREVSIDLYALRIDFGTILPLSFTKQLVHVYRNTDGTVRREAHVVTFY

SEQ ID NO: 42452 - protein, 84 aa, unidentified
  REGION 1..84: note = Description of Unknown:cds_NZ_WFIY01000004.1_cds_WP_155864189.1_2149 target sequence
GTILPLSFTKQLVHVYRNTDGTVRREAHVVTFYGKKGISRGYIVSKPRAISTLEDSESFTQEILTKKDNGLLVENIIPNFYHIR

SEQ ID NO: 42453 - protein, 85 aa, unidentified
  REGION 1..85: note = Description of Unknown:cds_NZ_WFIY01000004.1_cds_WP_155864189.1_2149 target sequence
EAEIDGKKYIGREVSIDLYALRIDFGTILPLSFTKQLVHVYRNTDGTVRREAHVVTFYGKKGISRGYIVSKPRAISTLEDSESFT

SEQ ID NO: 42454 - protein, 85 aa, unidentified
  REGION 1..85: note = Description of Unknown:cds_NZ_WFIY01000004.1_cds_WP_155864253.1_2244 target sequence
ITFTVEGRLEGNVAKTCVAGKEVDIGLMGSDYPTPEEMLLASALSCMMLTIYYVAKEMNVKLDDVEGYIEGTMDPRGFQGDPNVP

SEQ ID NO: 42455 - protein, 84 aa, unidentified
  REGION 1..84: note = Description of Unknown:cds_NZ_WFIY01000004.1_cds_WP_155864253.1_2244 target sequence
YVAKEMNVKLDDVEGYIEGTMDPRGFQGDPNVPPGLLEVNYFITVKSNDERINEVLEQSMRRCPLKDTLIRQIKVNVKWKVEKE

SEQ ID NO: 42456 - protein, 85 aa, unidentified
  REGION 1..85: note = Description of Unknown:cds_NZ_WFIY01000004.1_cds_WP_155864253.1_2244 target sequence
MGSDYPTPEEMLLASALSCMMLTIYYVAKEMNVKLDDVEGYIEGTMDPRGFQGDPNVPPGLLEVNYFITVKSNDERINEVLEQSM

SEQ ID NO: 42457 - protein, 85 aa, unidentified
  REGION 1..85: note = Description of Unknown:cds_NC_030656.1_cds_YP_009268788.1_73 target sequence
DPKTDKEIYEYCDANPTDIRCRCLNPDPSIVKIGKETRLPYYCWYEPCKRADALLPAFLKKNISRCNVSDCSVSLGHVSLQKGNM

SEQ ID NO: 42458 - protein, 84 aa, unidentified
  REGION 1..84: note = Description of Unknown:cds_NC_030656.1_cds_YP_009268788.1_73 target sequence
ALLPAFLKKNISRCNVSDCSVSLGHVSLQKGNMNVFNVCGSHTHTTVKFSAKYLNQDIVYPIFDPKQWLPFIIIAFSIVILISK

SEQ ID NO: 42459 - protein, 85 aa, unidentified
  REGION 1..85: note = Description of Unknown:cds_NC_030656.1_cds_YP_009268788.1_73 target sequence
PSIVKIGKETRLPYYCWYEPCKRADALLPAFLKKNISRCNVSDCSVSLGHVSLQKGNMNVFNVCGSHTHTTVKFSAKYLNQDIVY

SEQ ID NO: 42460 - protein, 85 aa, unidentified
  REGION 1..85: note = Description of Unknown:cds_NC_035464.1_cds_YP_009408158.1_12 target sequence
VKLYMKTIEIQYSIPASAPSESQVPGVFIDLSSGTSQGQLQVPVNQEWVIIDVYNRGSQDVGVDAVATFTKNSVSNVLTTDPVSS

SEQ ID NO: 42461 - protein, 84 aa, unidentified
  REGION 1..84: note = Description of Unknown:cds_NC_035464.1_cds_YP_009408158.1_12 target sequence
YNRGSQDVGVDAVATFTKNSVSNVLTTDPVSSLNISNPSRPTYPPIQMAPGTILTSKVTTLTSNGTSAAVDNLFIKVKIIDYSQ

SEQ ID NO: 42462 - protein, 85 aa, unidentified
  REGION 1..85: note = Description of Unknown:cds_NC_035464.1_cds_YP_009408158.1_12 target sequence
FIDLSSGTSQGQLQVPVNQEWVIIDVYNRGSQDVGVDAVATFTKNSVSNVLTTDPVSSLNISNPSRPTYPPIQMAPGTILTSKVT

SEQ ID NO: 42463 - protein, 85 aa, unidentified
  REGION 1..85: note = Description of Unknown:cds_NC_005830.1_cds_YP_003748.1_23 target sequence
LSSKQTQKLVVSDPELNKYVECIELLDEWKQIIDRARRTIFSLDPDFRREVYANVSMLIGNDNDPVKQVLYKYVQDKLESRMGSK

SEQ ID NO: 42464 - protein, 84 aa, unidentified
  REGION 1..84: note = Description of Unknown:cds_NC_005830.1_cds_YP_003748.1_23 target sequence
NVSMLIGNDNDPVKQVLYKYVQDKLESRMGSKAEKSSFNYIPVPDKIVNCMDLLKSAIMFEKVAQKYGDVDELEKEEKSSNNST

SEQ ID NO: 42465 - protein, 85 aa, unidentified
  REGION 1..85: note = Description of Unknown:cds_NC_005830.1_cds_YP_003748.1_23 target sequence
EWKQIIDRARRTIFSLDPDFRREVYANVSMLIGNDNDPVKQVLYKYVQDKLESRMGSKAEKSSFNYIPVPDKIVNCMDLLKSAIM

SEQ ID NO: 42466 - protein, 85 aa, unidentified
  REGION 1..85: note = Description of Unknown:cds_NC_007409.1_cds_YP_319870.1_39 target sequence
ASQKNSESLVGELVNQINELYLTNPNQVIKLAKKAGVENPTFLVKPPTKPTNELSFAKLNNIAETVEKLEKYGLPSLLRQYFMTV

SEQ ID NO: 42467 - protein, 84 aa, unidentified
  REGION 1..84: note = Description of Unknown:cds_NC_007409.1_cds_YP_319870.1_39 target sequence
ELSFAKLNNIAETVEKLEKYGLPSLLRQYFMTVVKNPAVIDNVVETYYKIAKIIPKEVENKEPLVISEKEGFVSKSIPPVIKVS

SEQ ID NO: 42468 - protein, 85 aa, unidentified
  REGION 1..85: note = Description of Unknown:cds_NC_007409.1_cds_YP_319870.1_39 target sequence
VIKLAKKAGVENPTFLVKPPTKPTNELSFAKLNNIAETVEKLEKYGLPSLLRQYFMTVVKNPAVIDNVVETYYKIAKIIPKEVEN

SEQ ID NO: 42469 - protein, 85 aa, unidentified
  REGION 1..85: note = Description of Unknown:hvTR_P11315.1 target sequence
TDPIATSSTAAKELLDMDGRASEQRLIQLRIRQQQERAVKELRDAIGIHQCKKGIFCLVKQSKISYEITATDHRLSYELGPQRQK

SEQ ID NO: 42470 - protein, 84 aa, unidentified
  REGION 1..84: note = Description of Unknown:hvTR_P11315.1 target sequence
KKGIFCLVKQSKISYEITATDHRLSYELGPQRQKFTCMVGINPIVITQQSGDTKGCIQCSCDSTECIYTLLKTLCGLRDLLPMN

SEQ ID NO: 42471 - protein, 85 aa, unidentified
  REGION 1..85: note = Description of Unknown:hvTR_P11315.1 target sequence
QLRIRQQQERAVKELRDAIGIHQCKKGIFCLVKQSKISYEITATDHRLSYELGPQRQKFTCMVGINPIVITQQSGDTKGCIQCSC

SEQ ID NO: 42472 - protein, 85 aa, unidentified
  REGION 1..85: note = Description of Unknown:vpeps_2X4J_1 target sequence
GMGAPNQQQTQDRSVDFFTNKIGCNVSSPLKHVDIVGEIVEEAVYNFLIDAGDKMCVGNKIGVWKVSKCEGSSGSGGERRKSLYA

SEQ ID NO: 42473 - protein, 85 aa, unidentified
  REGION 1..85: note = Description of Unknown:vpeps_2X4J_1 target sequence
DKMCVGNKIGVWKVSKCEGSSGSGGERRKSLYAKVPKGIGVTVYLANGRVQGRLIDIGVYEVLVEEVGDIIYIHKDLVYALCWPK

SEQ ID NO: 42474 - protein, 85 aa, unidentified
  REGION 1..85: note = Description of Unknown:vpeps_2X4J_1 target sequence
SPLKHVDIVGEIVEEAVYNFLIDAGDKMCVGNKIGVWKVSKCEGSSGSGGERRKSLYAKVPKGIGVTVYLANGRVQGRLIDIGVY

SEQ ID NO: 42475 - protein, 85 aa, unidentified
  REGION 1..85: note = Description of Unknown:cds_NZ_WFIY01000004.1_cds_WP_155863170.1_1100 target sequence
ESINSNETRKKIYYYLLKQGKPIGLKKIQRDLGISSPSLVHYHLKRLEEQGLVKETPEGYVINKVLLSEFVKVANHLIPISAFWS

SEQ ID NO: 42476 - protein, 84 aa, unidentified
  REGION 1..84: note = Description of Unknown:cds_NZ_WFIY01000004.1_cds_WP_155863170.1_1100 target sequence
LVKETPEGYVINKVLLSEFVKVANHLIPISAFWSSFFLTSLVLEIALLLTGKIIDSAVFGIIIVAISSALSVKELIKKYKEIKL

SEQ ID NO: 42477 - protein, 85 aa, unidentified
  REGION 1..85: note = Description of Unknown:cds_NZ_WFIY01000004.1_cds_WP_155863170.1_1100 target sequence
IQRDLGISSPSLVHYHLKRLEEQGLVKETPEGYVINKVLLSEFVKVANHLIPISAFWSSFFLTSLVLEIALLLTGKIIDSAVFGI

SEQ ID NO: 42478 - protein, 85 aa, unidentified
  REGION 1..85: note = Description of Unknown:cds_NZ_WFIY01000004.1_cds_WP_155864405.1_1139 target sequence
WDTIRYEGVYGYKQDLSQYIAKGDYLIIYVSKYYAKVYGGKIVGIVKVLTEWYRDETPIFPEEKVRNRALFPYRVRVEPVIIGVC

SEQ ID NO: 42479 - protein, 84 aa, unidentified
  REGION 1..84: note = Description of Unknown:cds_NZ_WFIY01000004.1_cds_WP_155864405.1_1139 target sequence
WYRDETPIFPEEKVRNRALFPYRVRVEPVIIGVCDFKSILDKIVFIEDKAQLAKYLRNAPANLKRPIPEQDAKLIEECLNGHIY

SEQ ID NO: 42480 - protein, 85 aa, unidentified
  REGION 1..85: note = Description of Unknown:cds_NZ_WFIY01000004.1_cds_WP_155864405.1_1139 target sequence
IYVSKYYAKVYGGKIVGIVKVLTEWYRDETPIFPEEKVRNRALFPYRVRVEPVIIGVCDFKSILDKIVFIEDKAQLAKYLRNAPA

SEQ ID NO: 42481 - protein, 85 aa, unidentified
  REGION 1..85: note = Description of Unknown:cds_NZ_WFIY01000004.1_cds_WP_155863226.1_1173 target sequence
AGKFLFITKDRKFLFDGKVREVKKELQDLDGMEIRFARPMIVYELDGVNLNYFVKNYGHLTVGDYTVLDLVDLLEENNFILYVDH

SEQ ID NO: 42482 - protein, 84 aa, unidentified
  REGION 1..84: note = Description of Unknown:cds_NZ_WFIY01000004.1_cds_WP_155863226.1_1173 target sequence
YFVKNYGHLTVGDYTVLDLVDLLEENNFILYVDHDKEKVEVFVQGKEEIITLPYSTLDFLRYLLAKTSRGVLLESTTFDLIDEN

SEQ ID NO: 42483 - protein, 85 aa, unidentified
  REGION 1..85: note = Description of Unknown:cds_NZ_WFIY01000004.1_cds_WP_155863226.1_1173 target sequence
DLDGMEIRFARPMIVYELDGVNLNYFVKNYGHLTVGDYTVLDLVDLLEENNFILYVDHDKEKVEVFVQGKEEIITLPYSTLDFLR

SEQ ID NO: 42484 - protein, 85 aa, unidentified
  REGION 1..85: note = Description of Unknown:cds_NZ_WFIY01000004.1_cds_WP_155863396.1_1372 target sequence
LYYVPQKVSELTAYEFVLTARRPYVDFDYSKEDRKIALDALKEVGMLQFKDRLLTELSGGQLQKIYIARALASGANVLLFDEPTS

SEQ ID NO: 42485 - protein, 84 aa, unidentified
  REGION 1..84: note = Description of Unknown:cds_NZ_WFIY01000004.1_cds_WP_155863396.1_1372 target sequence
LLTELSGGQLQKIYIARALASGANVLLFDEPTSNLDPKASSEVMRLLKRIGLYTNKAIIISIHGLTLAYRYSDIRTKNYGNRQD

SEQ ID NO: 42486 - protein, 85 aa, unidentified
  REGION 1..85: note = Description of Unknown:cds_NZ_WFIY01000004.1_cds_WP_155863396.1_1372 target sequence
DYSKEDRKIALDALKEVGMLQFKDRLLTELSGGQLQKIYIARALASGANVLLFDEPTSNLDPKASSEVMRLLKRIGLYTNKAIII

SEQ ID NO: 42487 - protein, 85 aa, unidentified
  REGION 1..85: note = Description of Unknown:cds_NZ_WFIY01000004.1_cds_WP_155863447.1_1417 target sequence
KYSTEISTSHSIDALLTLLSDPSFVLPKIFKSIKKIETTNSRFSATASYLGLTHEVNGNVFRSVNEISYVFILRHGKDTGSGKLS

SEQ ID NO: 42488 - protein, 84 aa, unidentified
  REGION 1..84: note = Description of Unknown:cds_NZ_WFIY01000004.1_cds_WP_155863447.1_1417 target sequence
LTHEVNGNVFRSVNEISYVFILRHGKDTGSGKLSFIISNNKVDIIFEYEGWMERLSQSIIIKWIKEFCSNFEEDIRIERIKRKL

SEQ ID NO: 42489 - protein, 85 aa, unidentified
  REGION 1..85: note = Description of Unknown:cds_NZ_WFIY01000004.1_cds_WP_155863447.1_1417 target sequence
KIFKSIKKIETTNSRFSATASYLGLTHEVNGNVFRSVNEISYVFILRHGKDTGSGKLSFIISNNKVDIIFEYEGWMERLSQSIII

SEQ ID NO: 42490 - protein, 85 aa, unidentified
  REGION 1..85: note = Description of Unknown:cds_NZ_WFIY01000004.1_cds_WP_155863763.1_1637 target sequence
VIRLDRLSRLMILAGIIMLLSSIILGDILLQVNSSSQELIIPPHGTLVTSFNSNSIVVFQGNGVSIHGNNIYTIGCKVINLQGKV

SEQ ID NO: 42491 - protein, 84 aa, unidentified
  REGION 1..84: note = Description of Unknown:cds_NZ_WFIY01000004.1_cds_WP_155863763.1_1637 target sequence
SNSIVVFQGNGVSIHGNNIYTIGCKVINLQGKVSIVNNSSCSVNLNEKTILLPRLLYIIIFPIIIIGGIIFISGILISMYLKLR

SEQ ID NO: 42492 - protein, 85 aa, unidentified
  REGION 1..85: note = Description of Unknown:cds_NZ_WFIY01000004.1_cds_WP_155863763.1_1637 target sequence
ILLQVNSSSQELIIPPHGTLVTSFNSNSIVVFQGNGVSIHGNNIYTIGCKVINLQGKVSIVNNSSCSVNLNEKTILLPRLLYIII

SEQ ID NO: 42493 - protein, 85 aa, unidentified
  REGION 1..85: note = Description of Unknown:cds_NZ_WFIY01000004.1_cds_WP_013776993.1_1808 target sequence
KVKIGIEGFTIDSAHYTLSSPGDSQLHGHTYIINVEVEGNINPANGFVIDFNKLKDEIGKIIKEWDHKLIVPKKDLEKISISGPF

SEQ ID NO: 42494 - protein, 84 aa, unidentified
  REGION 1..84: note = Description of Unknown:cds_NZ_WFIY01000004.1_cds_WP_013776993.1_1808 target sequence
NKLKDEIGKIIKEWDHKLIVPKKDLEKISISGPFRNEIKIIEEDYPTAEYIGFELAKEIYNRINMPIKIKIYEGKDSYAIIEYP

SEQ ID NO: 42495 - protein, 85 aa, unidentified
  REGION 1..85: note = Description of Unknown:cds_NZ_WFIY01000004.1_cds_WP_013776993.1_1808 target sequence
GHTYIINVEVEGNINPANGFVIDFNKLKDEIGKIIKEWDHKLIVPKKDLEKISISGPFRNEIKIIEEDYPTAEYIGFELAKEIYN

SEQ ID NO: 42496 - protein, 85 aa, unidentified
  REGION 1..85: note = Description of Unknown:cds_NZ_WFIY01000004.1_cds_WP_155863923.1_1837 target sequence
EDYEYLLDRVYSKLPKKSQVSETQTLPSLIIFNVGNSTIIKNFSEYCDRIRREDKLCMRYLLKELAAAGSINESGQLYIQGKFSS

SEQ ID NO: 42497 - protein, 84 aa, unidentified
  REGION 1..84: note = Description of Unknown:cds_NZ_WFIY01000004.1_cds_WP_155863923.1_1837 target sequence
REDKLCMRYLLKELAAAGSINESGQLYIQGKFSSSVINTLMERFLKTYVQCSTCKSLDTVLVKEGKIWYIQCLACGAKNPVKPL

SEQ ID NO: 42498 - protein, 85 aa, unidentified
  REGION 1..85: note = Description of Unknown:cds_NZ_WFIY01000004.1_cds_WP_155863923.1_1837 target sequence
SLIIFNVGNSTIIKNFSEYCDRIRREDKLCMRYLLKELAAAGSINESGQLYIQGKFSSSVINTLMERFLKTYVQCSTCKSLDTVL

SEQ ID NO: 42499 - protein, 85 aa, unidentified
  REGION 1..85: note = Description of Unknown:cds_NZ_WFIY01000004.1_cds_WP_155864153.1_2107 target sequence
KGISDFVAFLIILVIIVGIILPLSLFLLNPYYQSQQSESQNPQIINNGLITITYVSNNKGGILNITYSTVEPEVIEIYNYSNGIW

SEQ ID NO: 42500 - protein, 84 aa, unidentified
  REGION 1..84: note = Description of Unknown:cds_NZ_WFIY01000004.1_cds_WP_155864153.1_2107 target sequence
ITYVSNNKGGILNITYSTVEPEVIEIYNYSNGIWVKANYSFLSSCKNSLIYKICGYAPEIDVELNIAGRIYYATVSYGSTAKVT

SEQ ID NO: 42501 - protein, 85 aa, unidentified
  REGION 1..85: note = Description of Unknown:cds_NZ_WFIY01000004.1_cds_WP_155864153.1_2107 target sequence
LNPYYQSQQSESQNPQIINNGLITITYVSNNKGGILNITYSTVEPEVIEIYNYSNGIWVKANYSFLSSCKNSLIYKICGYAPEID

SEQ ID NO: 42502 - protein, 85 aa, unidentified
  REGION 1..85: note = Description of Unknown:cds_NC_029316.1_cds_YP_009230316.1_63 target sequence
DKLDIIKQVSFYLDSINYGISSKLFSDDLILTELKKATVSYFSHSILSIVGSLDLSNAKMPSHVISAIINFIRSRAYDLAKLDQR

SEQ ID NO: 42503 - protein, 84 aa, unidentified
  REGION 1..84: note = Description of Unknown:cds_NC_029316.1_cds_YP_009230316.1_63 target sequence
SLDLSNAKMPSHVISAIINFIRSRAYDLAKLDQRIMDNNYQTLFIYTTIRSIIMIMAERLGITDEINSLFNSLEEGENIRNKIG

SEQ ID NO: 42504 - protein, 85 aa, unidentified
  REGION 1..85: note = Description of Unknown:cds_NC_029316.1_cds_YP_009230316.1_63 target sequence
DLILTELKKATVSYFSHSILSIVGSLDLSNAKMPSHVISAIINFIRSRAYDLAKLDQRIMDNNYQTLFIYTTIRSIIMIMAERLG

SEQ ID NO: 42505 - protein, 85 aa, unidentified
  REGION 1..85: note = Description of Unknown:cds_NC_035464.1_cds_YP_009408163.1_17 target sequence
SCQTCGQQGVCYVLEHVGTEPIYINGQQYGQGDFCFSSPELTIEYQGVQYQIDMSYAPTVQNIYGCCPSGTTAKLTTVTTIQGQN

SEQ ID NO: 42506 - protein, 84 aa, unidentified
  REGION 1..84: note = Description of Unknown:cds_NC_035464.1_cds_YP_009408163.1_17 target sequence
IDMSYAPTVQNIYGCCPSGTTAKLTTVTTIQGQNTPIFVPYAVLVSQGTTSTSSTTPSVLSKVPWWLIILLVILGAILLGGGNP

SEQ ID NO: 42507 - protein, 85 aa, unidentified
  REGION 1..85: note = Description of Unknown:cds_NC_035464.1_cds_YP_009408163.1_17 target sequence
QYGQGDFCFSSPELTIEYQGVQYQIDMSYAPTVQNIYGCCPSGTTAKLTTVTTIQGQNTPIFVPYAVLVSQGTTSTSSTTPSVLS

SEQ ID NO: 42508 - protein, 85 aa, unidentified
  REGION 1..85: note = Description of Unknown:vpeps_5HI8_1 target sequence
NSMIDKFCDWFEGEFDNWTQAASNPTKWAHIIVKHEKISEYKYHTSSRYSYMDKPYREQTVDIEYVCPELIIVHNPACDIIFKWT

SEQ ID NO: 42509 - protein, 85 aa, unidentified
  REGION 1..85: note = Description of Unknown:vpeps_5HI8_1 target sequence
MDKPYREQTVDIEYVCPELIIVHNPACDIIFKWTGIYFEGESEPDCQWNGQPLDSKARLYADEYHTWDVGYWEGSEGFFHFKKNV

SEQ ID NO: 42510 - protein, 85 aa, unidentified
  REGION 1..85: note = Description of Unknown:vpeps_5HI8_1 target sequence
WAHIIVKHEKISEYKYHTSSRYSYMDKPYREQTVDIEYVCPELIIVHNPACDIIFKWTGIYFEGESEPDCQWNGQPLDSKARLYA

SEQ ID NO: 42511 - protein, 85 aa, unidentified
  REGION 1..85: note = Description of Unknown:cds_NZ_WFIY01000004.1_cds_WP_155862516.1_277 target sequence
LGEIKVGKYIVLDDRLYTETDEWVKIDGDVAVVGITDYAQKKLRDIVGIELPKVNQEVKAGDPVGTIESVKAASDLYSPLSGIVV

SEQ ID NO: 42512 - protein, 84 aa, unidentified
  REGION 1..84: note = Description of Unknown:cds_NZ_WFIY01000004.1_cds_WP_155862516.1_277 target sequence
PKVNQEVKAGDPVGTIESVKAASDLYSPLSGIVVEVNEGLETSPEIINKDPYGEGWMFKIKIKDKSEAQRLLTPEKYIEKIRGE

SEQ ID NO: 42513 - protein, 85 aa, unidentified
  REGION 1..85: note = Description of Unknown:cds_NZ_WFIY01000004.1_cds_WP_155862516.1_277 target sequence
GDVAVVGITDYAQKKLRDIVGIELPKVNQEVKAGDPVGTIESVKAASDLYSPLSGIVVEVNEGLETSPEIINKDPYGEGWMFKIK

SEQ ID NO: 42514 - protein, 85 aa, unidentified
  REGION 1..85: note = Description of Unknown:cds_NZ_WFIY01000004.1_cds_WP_155862530.1_294 target sequence
SSPTYTVSLWFRRILVPVDGSENSMRALELATDFSLRYGSKVTVIHVCSTCEEAEHVKKKVEERIGDKIDYDFKIIKMSNDSSVP

SEQ ID NO: 42515 - protein, 84 aa, unidentified
  REGION 1..84: note = Description of Unknown:cds_NZ_WFIY01000004.1_cds_WP_155862530.1_294 target sequence
CEEAEHVKKKVEERIGDKIDYDFKIIKMSNDSSVPNEILKVINEDTFDAVIMGSRGTSVNSDINIGSTVLSVAANASITVIIVR

SEQ ID NO: 42516 - protein, 85 aa, unidentified
  REGION 1..85: note = Description of Unknown:cds_NZ_WFIY01000004.1_cds_WP_155862530.1_294 target sequence
LELATDFSLRYGSKVTVIHVCSTCEEAEHVKKKVEERIGDKIDYDFKIIKMSNDSSVPNEILKVINEDTFDAVIMGSRGTSVNSD

SEQ ID NO: 42517 - protein, 85 aa, unidentified
  REGION 1..85: note = Description of Unknown:cds_NZ_WFIY01000004.1_cds_WP_152940925.1_297 target sequence
KVFPAQVWRNKESLYSLIAGKCNKCGNLFFPYREICNKCGSTSVSKVKLSGRGTLISYTVSYQTRPGFEKTAPEYVGLIRLDEGI

SEQ ID NO: 42518 - protein, 84 aa, unidentified
  REGION 1..84: note = Description of Unknown:cds_NZ_WFIY01000004.1_cds_WP_152940925.1_297 target sequence
GRGTLISYTVSYQTRPGFEKTAPEYVGLIRLDEGIEIVAPLTDITGEIKDNSRVEAVIRRLKADSSNGLIEYGIKFRLVEDEHR

SEQ ID NO: 42519 - protein, 85 aa, unidentified
  REGION 1..85: note = Description of Unknown:cds_NZ_WFIY01000004.1_cds_WP_152940925.1_297 target sequence
LFFPYREICNKCGSTSVSKVKLSGRGTLISYTVSYQTRPGFEKTAPEYVGLIRLDEGIEIVAPLTDITGEIKDNSRVEAVIRRLK

SEQ ID NO: 42520 - protein, 85 aa, unidentified
  REGION 1..85: note = Description of Unknown:cds_NZ_WFIY01000004.1_cds_WP_155864379.1_621 target sequence
IVGGLGTLVNEGVFLLSAHSMPIFFSLGLAIELSIIFNFILNDIWTFKDRRVGSFIKRLLKFHVSSFSGGIVQYITVILLLVVFL

SEQ ID NO: 42521 - protein, 84 aa, unidentified
  REGION 1..84: note = Description of Unknown:cds_NZ_WFIY01000004.1_cds_WP_155864379.1_621 target sequence
RVGSFIKRLLKFHVSSFSGGIVQYITVILLLVVFLHFSNLSEILLFLFFSYIKAQSLFLAVINFIGIVSGFAVRFITSLKYVWA

SEQ ID NO: 42522 - protein, 85 aa, unidentified
  REGION 1..85: note = Description of Unknown:cds_NZ_WFIY01000004.1_cds_WP_155864379.1_621 target sequence
GLAIELSIIFNFILNDIWTFKDRRVGSFIKRLLKFHVSSFSGGIVQYITVILLLVVFLHFSNLSEILLFLFFSYIKAQSLFLAVI

SEQ ID NO: 42523 - protein, 85 aa, unidentified
  REGION 1..85: note = Description of Unknown:cds_NZ_WFIY01000004.1_cds_WP_155863040.1_932 target sequence
TKSVSKLKIKGKEVIMIELRKHGIDSIMLNGEIKVGEYDGVEFVKKEVSEEKMKIAEEYSLKVKELLNLCPCIISIVYSDMLYVK

SEQ ID NO: 42524 - protein, 84 aa, unidentified
  REGION 1..84: note = Description of Unknown:cds_NZ_WFIY01000004.1_cds_WP_155863040.1_932 target sequence
EKMKIAEEYSLKVKELLNLCPCIISIVYSDMLYVKFYYNSVDVIAFISQNGYTTYNKQISIDKSTEGRIKDCALKFLEILGVKL

SEQ ID NO: 42525 - protein, 85 aa, unidentified
  REGION 1..85: note = Description of Unknown:cds_NZ_WFIY01000004.1_cds_WP_155863040.1_932 target sequence
MLNGEIKVGEYDGVEFVKKEVSEEKMKIAEEYSLKVKELLNLCPCIISIVYSDMLYVKFYYNSVDVIAFISQNGYTTYNKQISID

SEQ ID NO: 42526 - protein, 85 aa, unidentified
  REGION 1..85: note = Description of Unknown:cds_NC_035460.1_cds_YP_009408025.1_74 target sequence
LTDEEIYNYCDNNKNDIRCKCIYPDQSIIKIGTETRLPYYCWYEPCKRSDALLTQVLKKNISKCNISDCVVSLGNVSIKNGVLDV

SEQ ID NO: 42527 - protein, 84 aa, unidentified
  REGION 1..84: note = Description of Unknown:cds_NC_035460.1_cds_YP_009408025.1_74 target sequence
ALLTQVLKKNISKCNISDCVVSLGNVSIKNGVLDVRNTCGSNITFTNELVTTKYLNQEIQYFVLHPRWFPICLLFLVGLCLVIN

SEQ ID NO: 42528 - protein, 85 aa, unidentified
  REGION 1..85: note = Description of Unknown:cds_NC_035460.1_cds_YP_009408025.1_74 target sequence
IIKIGTETRLPYYCWYEPCKRSDALLTQVLKKNISKCNISDCVVSLGNVSIKNGVLDVRNTCGSNITFTNELVTTKYLNQEIQYF

SEQ ID NO: 42529 - protein, 85 aa, unidentified
  REGION 1..85: note = Description of Unknown:cds_NC_029316.1_cds_YP_009230298.1_45 target sequence
AKYEATKGDYAGGVLAILTQYFNNMVGYPEVSLKLAGEEANMSREGMINQKEIVHEMVETIRRASEPIRQGRGFHDAYVYFASVP

SEQ ID NO: 42530 - protein, 84 aa, unidentified
  REGION 1..84: note = Description of Unknown:cds_NC_029316.1_cds_YP_009230298.1_45 target sequence
KEIVHEMVETIRRASEPIRQGRGFHDAYVYFASVPENAPPNSIALPPQAQSEVQAKLTELMQKLANRNPQGVAEEEQELATQGI

SEQ ID NO: 42531 - protein, 85 aa, unidentified
  REGION 1..85: note = Description of Unknown:cds_NC_029316.1_cds_YP_009230298.1_45 target sequence
YPEVSLKLAGEEANMSREGMINQKEIVHEMVETIRRASEPIRQGRGFHDAYVYFASVPENAPPNSIALPPQAQSEVQAKLTELMQ

SEQ ID NO: 42532 - protein, 85 aa, unidentified
  REGION 1..85: note = Description of Unknown:cds_NC_005830.1_cds_YP_003739.1_14 target sequence
SKFAQKIEKLKKSLLNRLEEQDIVSVDVASKGSVYIGLLGFRQDDRKAVTLYVRGQNPKKKLYVNLDEVDNYIRVFEFLKKHKEE

SEQ ID NO: 42533 - protein, 84 aa, unidentified
  REGION 1..84: note = Description of Unknown:cds_NC_005830.1_cds_YP_003739.1_14 target sequence
LYVRGQNPKKKLYVNLDEVDNYIRVFEFLKKHKEELEKIVGKPPKSTSAPDIDELEEEPDEETEEKSEEKTEKKKKESEDEDEL

SEQ ID NO: 42534 - protein, 85 aa, unidentified
  REGION 1..85: note = Description of Unknown:cds_NC_005830.1_cds_YP_003739.1_14 target sequence
VASKGSVYIGLLGFRQDDRKAVTLYVRGQNPKKKLYVNLDEVDNYIRVFEFLKKHKEELEKIVGKPPKSTSAPDIDELEEEPDEE

SEQ ID NO: 42535 - protein, 85 aa, unidentified
  REGION 1..85: note = Description of Unknown:cds_NC_038931.1_cds_YP_009509130.1_14 target sequence
KKFINRLLLMLMSVVVGRIAGANELEMRYQAGIEVKRDVQVKRVERKISYRAPRIEDAIALNIYVEDKISGIKPYIPGLTGLVRK

SEQ ID NO: 42536 - protein, 84 aa, unidentified
  REGION 1..84: note = Description of Unknown:cds_NC_038931.1_cds_YP_009509130.1_14 target sequence
YRAPRIEDAIALNIYVEDKISGIKPYIPGLTGLVRKAIKIAYRDGVDSAMNIFKSYDTAIQNEIRKIIEEGLKMYEKIRSEGRP

SEQ ID NO: 42537 - protein, 85 aa, unidentified
  REGION 1..85: note = Description of Unknown:cds_NC_038931.1_cds_YP_009509130.1_14 target sequence
RYQAGIEVKRDVQVKRVERKISYRAPRIEDAIALNIYVEDKISGIKPYIPGLTGLVRKAIKIAYRDGVDSAMNIFKSYDTAIQNE

SEQ ID NO: 42538 - protein, 85 aa, unidentified
  REGION 1..85: note = Description of Unknown:cds_NZ_WFIY01000004.1_cds_WP_155862867.1_705 target sequence
IKKKRGLGEGLITFPGGKVEENETPLECAIRETEEEVGVKIINPRKVGVITFKQINGNVQVMHVYLATEFIGILKESDEAIPIWV

SEQ ID NO: 42539 - protein, 84 aa, unidentified
  REGION 1..84: note = Description of Unknown:cds_NZ_WFIY01000004.1_cds_WP_155862867.1_705 target sequence
ITFKQINGNVQVMHVYLATEFIGILKESDEAIPIWVQRNDLPFKNMWVDDRIWLPLVLEGKYVNCVFEFTNDWKFMVSSLCEFA

SEQ ID NO: 42540 - protein, 85 aa, unidentified
  REGION 1..85: note = Description of Unknown:cds_NZ_WFIY01000004.1_cds_WP_155862867.1_705 target sequence
CAIRETEEEVGVKIINPRKVGVITFKQINGNVQVMHVYLATEFIGILKESDEAIPIWVQRNDLPFKNMWVDDRIWLPLVLEGKYV

SEQ ID NO: 42541 - protein, 85 aa, unidentified
  REGION 1..85: note = Description of Unknown:cds_NZ_WFIY01000004.1_cds_WP_155863035.1_923 target sequence
NDSDTQVNIALTHFETLIEDHSTYLNELENLSAIPQMDMDRVMRIIKRMRKIRKDLELGINTILTHIDSVGNSRIKEEAIGIISY

SEQ ID NO: 42542 - protein, 84 aa, unidentified
  REGION 1..84: note = Description of Unknown:cds_NZ_WFIY01000004.1_cds_WP_155863035.1_923 target sequence
RKIRKDLELGINTILTHIDSVGNSRIKEEAIGIISYLNIVGFKDEKEILQKLSTQAKEMGYDINVDDDIKQIDNILSKISKISL

SEQ ID NO: 42543 - protein, 85 aa, unidentified
  REGION 1..85: note = Description of Unknown:cds_NZ_WFIY01000004.1_cds_WP_155863035.1_923 target sequence
LENLSAIPQMDMDRVMRIIKRMRKIRKDLELGINTILTHIDSVGNSRIKEEAIGIISYLNIVGFKDEKEILQKLSTQAKEMGYDI

SEQ ID NO: 42544 - protein, 85 aa, unidentified
  REGION 1..85: note = Description of Unknown:cds_NZ_WFIY01000004.1_cds_WP_170283900.1_944 target sequence
KIFEKEFKVKTNERFESIDITDNVEDAAKSIDSGIAYIFVKHTTCAVIVNEAEKGLMTDYLEWAKKLVPPEGKFNHNIIDNNGHA

SEQ ID NO: 42545 - protein, 84 aa, unidentified
  REGION 1..84: note = Description of Unknown:cds_NZ_WFIY01000004.1_cds_WP_170283900.1_944 target sequence
NEAEKGLMTDYLEWAKKLVPPEGKFNHNIIDNNGHAHIISSIIGNSRVVPVKGGKLDLGTWQRIILLEFDGPRVRTVNVKVMGE

SEQ ID NO: 42546 - protein, 85 aa, unidentified
  REGION 1..85: note = Description of Unknown:cds_NZ_WFIY01000004.1_cds_WP_170283900.1_944 target sequence
AKSIDSGIAYIFVKHTTCAVIVNEAEKGLMTDYLEWAKKLVPPEGKFNHNIIDNNGHAHIISSIIGNSRVVPVKGGKLDLGTWQR

SEQ ID NO: 42547 - protein, 85 aa, unidentified
  REGION 1..85: note = Description of Unknown:cds_NZ_WFIY01000004.1_cds_WP_155863197.1_1134 target sequence
AQAEFVFEETVRIYDTDTQGIAHYASYYRFFTNAIEKYMQEKVGIKYPIVNDDLWFVIVESHAVYKRPLRLGDKISVVLSPKAIS

SEQ ID NO: 42548 - protein, 84 aa, unidentified
  REGION 1..84: note = Description of Unknown:cds_NZ_WFIY01000004.1_cds_WP_155863197.1_1134 target sequence
VNDDLWFVIVESHAVYKRPLRLGDKISVVLSPKAISKKIIRFDMNIFKDGEKTTEGYVVQASINPKTWKAIELPDELIARITTI

SEQ ID NO: 42549 - protein, 85 aa, unidentified
  REGION 1..85: note = Description of Unknown:cds_NZ_WFIY01000004.1_cds_WP_155863197.1_1134 target sequence
YRFFTNAIEKYMQEKVGIKYPIVNDDLWFVIVESHAVYKRPLRLGDKISVVLSPKAISKKIIRFDMNIFKDGEKTTEGYVVQASI

SEQ ID NO: 42550 - protein, 85 aa, unidentified
  REGION 1..85: note = Description of Unknown:cds_NZ_WFIY01000004.1_cds_WP_155863532.1_1473 target sequence
DFRIIESEAVASYLGMKIIEVKDGKSKLEIPYSEKICRRGGVLHGGMIMTSMDYAGGLAVASINDGIDQVTQELKVNFLEPMYKG

SEQ ID NO: 42551 - protein, 84 aa, unidentified
  REGION 1..84: note = Description of Unknown:cds_NZ_WFIY01000004.1_cds_WP_155863532.1_1473 target sequence
TSMDYAGGLAVASINDGIDQVTQELKVNFLEPMYKGPFIVEAKVLRKGRTAVVVEIEFKDSEGKLGAVGLGTWYIIRDRKVSKE

SEQ ID NO: 42552 - protein, 85 aa, unidentified
  REGION 1..85: note = Description of Unknown:cds_NZ_WFIY01000004.1_cds_WP_155863532.1_1473 target sequence
LEIPYSEKICRRGGVLHGGMIMTSMDYAGGLAVASINDGIDQVTQELKVNFLEPMYKGPFIVEAKVLRKGRTAVVVEIEFKDSEG

SEQ ID NO: 42553 - protein, 85 aa, unidentified
  REGION 1..85: note = Description of Unknown:cds_NZ_WFIY01000004.1_cds_WP_155863704.1_1560 target sequence
RISVEIETKHESNALLVVLSDPSFVLPNLFPPIKEVKISEGKYTCKGKFLGTPFEIVGNYYFSTEGRIKYVFTINKGGNGNLEFL

SEQ ID NO: 42554 - protein, 84 aa, unidentified
  REGION 1..84: note = Description of Unknown:cds_NZ_WFIY01000004.1_cds_WP_155863704.1_1560 target sequence
LGTPFEIVGNYYFSTEGRIKYVFTINKGGNGNLEFLIEQGKVTLIFDYDGWFEKISRLFISRWINEFKKNFEEKVRLKRIESKI

SEQ ID NO: 42555 - protein, 85 aa, unidentified
  REGION 1..85: note = Description of Unknown:cds_NZ_WFIY01000004.1_cds_WP_155863704.1_1560 target sequence
NLFPPIKEVKISEGKYTCKGKFLGTPFEIVGNYYFSTEGRIKYVFTINKGGNGNLEFLIEQGKVTLIFDYDGWFEKISRLFISRW

SEQ ID NO: 42556 - protein, 85 aa, unidentified
  REGION 1..85: note = Description of Unknown:cds_NZ_WFIY01000004.1_cds_WP_155863818.1_1710 target sequence
EIDPVEILRKKGLKVTPQRLAVLKLLSKGGHYSGEQIFEELKKNEPSISLSTVYNALEALESAGIINSFEANGITWYEMRRNPHV

SEQ ID NO: 42557 - protein, 84 aa, unidentified
  REGION 1..84: note = Description of Unknown:cds_NZ_WFIY01000004.1_cds_WP_155863818.1_1710 target sequence
LSTVYNALEALESAGIINSFEANGITWYEMRRNPHVNVICEDKNEIIDVDINIDEIIQQLKNKGINVINLSVVAYADCSKIENK

SEQ ID NO: 42558 - protein, 85 aa, unidentified
  REGION 1..85: note = Description of Unknown:cds_NZ_WFIY01000004.1_cds_WP_155863818.1_1710 target sequence
KGGHYSGEQIFEELKKNEPSISLSTVYNALEALESAGIINSFEANGITWYEMRRNPHVNVICEDKNEIIDVDINIDEIIQQLKNK

SEQ ID NO: 42559 - protein, 85 aa, unidentified
  REGION 1..85: note = Description of Unknown:cds_NC_035460.1_cds_YP_009407969.1_18 target sequence
DAFTKGSTLYALKNLTFNQLKEFMFISSDGLYLTHKNRLEFDVVDLADRIIIVNNNNPLKVFKHIKETLCLMDDVEFVLKYIDKC

SEQ ID NO: 42560 - protein, 84 aa, unidentified
  REGION 1..84: note = Description of Unknown:cds_NC_035460.1_cds_YP_009407969.1_18 target sequence
IIIVNNNNPLKVFKHIKETLCLMDDVEFVLKYIDKCIENCAKKVSFNTPLISEHIILCPKTPKKRRPRFRYIKPIDCRLRRRLF

SEQ ID NO: 42561 - protein, 85 aa, unidentified
  REGION 1..85: note = Description of Unknown:cds_NC_035460.1_cds_YP_009407969.1_18 target sequence
SDGLYLTHKNRLEFDVVDLADRIIIVNNNNPLKVFKHIKETLCLMDDVEFVLKYIDKCIENCAKKVSFNTPLISEHIILCPKTPK

SEQ ID NO: 42562 - protein, 85 aa, unidentified
  REGION 1..85: note = Description of Unknown:cds_NC_035460.1_cds_YP_009408019.1_68 target sequence
ECCTPTVYLNPVFIEPNIKHSLLNSYKYTFIILFEICIISVLLFTFFKTEILMLLRPKKYKSENYINKLKSATLICDGNVLKITG

SEQ ID NO: 42563 - protein, 84 aa, unidentified
  REGION 1..84: note = Description of Unknown:cds_NC_035460.1_cds_YP_009408019.1_68 target sequence
EILMLLRPKKYKSENYINKLKSATLICDGNVLKITGLANAKILPALALNKEPISINECKELLYSINGSRQVSLNDVLRKRQIIF

SEQ ID NO: 42564 - protein, 85 aa, unidentified
  REGION 1..85: note = Description of Unknown:cds_NC_035460.1_cds_YP_009408019.1_68 target sequence
YTFIILFEICIISVLLFTFFKTEILMLLRPKKYKSENYINKLKSATLICDGNVLKITGLANAKILPALALNKEPISINECKELLY

SEQ ID NO: 42565 - protein, 85 aa, unidentified
  REGION 1..85: note = Description of Unknown:cds_NC_035464.1_cds_YP_009408149.1_3 target sequence
SKIEVEQVVKYILDHPSTFLWYRWYLRQRHHLPFFSLTYSEDLRQKGVPVDMTRDKEVVVLVPIYTPYGVGGAEVLLSTPDKVMW

SEQ ID NO: 42566 - protein, 84 aa, unidentified
  REGION 1..84: note = Description of Unknown:cds_NC_035464.1_cds_YP_009408149.1_3 target sequence
VDMTRDKEVVVLVPIYTPYGVGGAEVLLSTPDKVMWSDDDFAFFGNWKFYGKFAWMVSLNRKHPLRRYALNEMRKEARMYAGKS

SEQ ID NO: 42567 - protein, 85 aa, unidentified
  REGION 1..85: note = Description of Unknown:cds_NC_035464.1_cds_YP_009408149.1_3 target sequence
QRHHLPFFSLTYSEDLRQKGVPVDMTRDKEVVVLVPIYTPYGVGGAEVLLSTPDKVMWSDDDFAFFGNWKFYGKFAWMVSLNRKH

SEQ ID NO: 42568 - protein, 85 aa, unidentified
  REGION 1..85: note = Description of Unknown:cds_NC_007409.1_cds_YP_319882.1_51 target sequence
AQVENVSLSQIIANPYLPPFSTTLFEIVIFTFIMITLYLIFRGSGLVRRRLVLLLIAIYVIVLQLFFTPYEYTTARLLPNGTVDY

SEQ ID NO: 42569 - protein, 84 aa, unidentified
  REGION 1..84: note = Description of Unknown:cds_NC_007409.1_cds_YP_319882.1_51 target sequence
RLVLLLIAIYVIVLQLFFTPYEYTTARLLPNGTVDYVVYTSQANIVMALDVLAGLMLILAVVYIILDYLRGFGKGDEEEGVIDL

SEQ ID NO: 42570 - protein, 85 aa, unidentified
  REGION 1..85: note = Description of Unknown:cds_NC_007409.1_cds_YP_319882.1_51 target sequence
VIFTFIMITLYLIFRGSGLVRRRLVLLLIAIYVIVLQLFFTPYEYTTARLLPNGTVDYVVYTSQANIVMALDVLAGLMLILAVVY

SEQ ID NO: 42571 - protein, 85 aa, unidentified
  REGION 1..85: note = Description of Unknown:hvTR_Q2KSD4 target sequence
TDPLNNTVNDLLDMDGRGSEQRLAQLRIRQQQERAVKELQDAVAIHQCKKGIFCLVKQAKISFEVTSTDHRLSYELLQQRQKFTC

SEQ ID NO: 42572 - protein, 84 aa, unidentified
  REGION 1..84: note = Description of Unknown:hvTR_Q2KSD4 target sequence
KKGIFCLVKQAKISFEVTSTDHRLSYELLQQRQKFTCLVGVNPIVITQQSGDTKGCIHCSCNSSECVYTLIKTLCGLRDLLPIN

SEQ ID NO: 42573 - protein, 85 aa, unidentified
  REGION 1..85: note = Description of Unknown:hvTR_Q2KSD4 target sequence
IRQQQERAVKELQDAVAIHQCKKGIFCLVKQAKISFEVTSTDHRLSYELLQQRQKFTCLVGVNPIVITQQSGDTKGCIHCSCNSS

SEQ ID NO: 42574 - protein, 85 aa, unidentified
  REGION 1..85: note = Description of Unknown:cds_NC_002645.1_cds_NP_073552.1_4 target sequence
ALGLFTLQLVSAVNQSLSNAKVSAEVSRQVIQDVKDGTVTFNLLAYTLMSLFVVYFALFKARSHRGRAALIVFKILILFVYVPLL

SEQ ID NO: 42575 - protein, 84 aa, unidentified
  REGION 1..84: note = Description of Unknown:cds_NC_002645.1_cds_NP_073552.1_4 target sequence
MSLFVVYFALFKARSHRGRAALIVFKILILFVYVPLLYWSQAYIYATLIAVILLGRFFHTAWHCWLYKTWDFIVFNVTTLCYAR

SEQ ID NO: 42576 - protein, 85 aa, unidentified
  REGION 1..85: note = Description of Unknown:cds_NC_002645.1_cds_NP_073552.1_4 target sequence
RQVIQDVKDGTVTFNLLAYTLMSLFVVYFALFKARSHRGRAALIVFKILILFVYVPLLYWSQAYIYATLIAVILLGRFFHTAWHC

SEQ ID NO: 42577 - protein, 85 aa, unidentified
  REGION 1..85: note = Description of Unknown:cds_NZ_WFIY01000004.1_cds_WP_155862551.1_320 target sequence
AKLTILLADNSMDKFYHGLVIAIGGKTLNWDVKFFVTSQAVILFTKEMKGKSKLKMGFFARLFISFQMKRMNIPDTSKLLMEAIK

SEQ ID NO: 42578 - protein, 84 aa, unidentified
  REGION 1..84: note = Description of Unknown:cds_NZ_WFIY01000004.1_cds_WP_155862551.1_320 target sequence
KGKSKLKMGFFARLFISFQMKRMNIPDTSKLLMEAIKEGVEFYVDEAGLKLAGFSKSDLLDGIKLSDTISFLEEAKTSDVVITL

SEQ ID NO: 42579 - protein, 85 aa, unidentified
  REGION 1..85: note = Description of Unknown:cds_NZ_WFIY01000004.1_cds_WP_155862551.1_320 target sequence
LNWDVKFFVTSQAVILFTKEMKGKSKLKMGFFARLFISFQMKRMNIPDTSKLLMEAIKEGVEFYVDEAGLKLAGFSKSDLLDGIK

SEQ ID NO: 42580 - protein, 85 aa, unidentified
  REGION 1..85: note = Description of Unknown:cds_NZ_WFIY01000004.1_cds_WP_155862896.1_743 target sequence
SINKLSKEKIYKLKQKYNSKIPDFLRYDWDKYFRLERQEKWRKTRGIDNKTRLKLKGFPPPVDPGYRKPKIIRYLHPSGLKPVII

SEQ ID NO: 42581 - protein, 84 aa, unidentified
  REGION 1..84: note = Description of Unknown:cds_NZ_WFIY01000004.1_cds_WP_155862896.1_743 target sequence
NKTRLKLKGFPPPVDPGYRKPKIIRYLHPSGLKPVIINNVKDLENIAKFKDQVIGIISSNVGFKKRLEIIKKATEMGIKLANGE

SEQ ID NO: 42582 - protein, 85 aa, unidentified
  REGION 1..85: note = Description of Unknown:cds_NZ_WFIY01000004.1_cds_WP_155862896.1_743 target sequence
DWDKYFRLERQEKWRKTRGIDNKTRLKLKGFPPPVDPGYRKPKIIRYLHPSGLKPVIINNVKDLENIAKFKDQVIGIISSNVGFK

SEQ ID NO: 42583 - protein, 85 aa, unidentified
  REGION 1..85: note = Description of Unknown:cds_NZ_WFIY01000004.1_cds_WP_155863314.1_1277 target sequence
LKEKYVLDAGPLSLFFAGKKDVKKFFEEMYKNNAIIYMNEVNLAEFIYNYILKLGKDIAIARHKYIRNSPIKIISPNENITETAA

SEQ ID NO: 42584 - protein, 84 aa, unidentified
  REGION 1..84: note = Description of Unknown:cds_NZ_WFIY01000004.1_cds_WP_155863314.1_1277 target sequence
YILKLGKDIAIARHKYIRNSPIKIISPNENITETAAILKSKYPYLSLADAYLIATAKEVGGKVITTDEDIEKTNEVECIIINLD

SEQ ID NO: 42585 - protein, 85 aa, unidentified
  REGION 1..85: note = Description of Unknown:cds_NZ_WFIY01000004.1_cds_WP_155863314.1_1277 target sequence
EMYKNNAIIYMNEVNLAEFIYNYILKLGKDIAIARHKYIRNSPIKIISPNENITETAAILKSKYPYLSLADAYLIATAKEVGGKV

SEQ ID NO: 42586 - protein, 85 aa, unidentified
  REGION 1..85: note = Description of Unknown:cds_NZ_WFIY01000004.1_cds_WP_155863769.1_1644 target sequence
QVVEQYTTPYYKHILSLPPSSVRKLWKQNKITLIDVRTPEEYEDHHIPGAILIPLDYLEVLSKFLPDNDVAVICEHGNRAFYATY

SEQ ID NO: 42587 - protein, 84 aa, unidentified
  REGION 1..84: note = Description of Unknown:cds_NZ_WFIY01000004.1_cds_WP_155863769.1_1644 target sequence
GAILIPLDYLEVLSKFLPDNDVAVICEHGNRAFYATYGMPHIYKKKAIHMQYGMAGWMAMGYEVESGMDENGKKWMKLLDSIES

SEQ ID NO: 42588 - protein, 85 aa, unidentified
  REGION 1..85: note = Description of Unknown:cds_NZ_WFIY01000004.1_cds_WP_155863769.1_1644 target sequence
QNKITLIDVRTPEEYEDHHIPGAILIPLDYLEVLSKFLPDNDVAVICEHGNRAFYATYGMPHIYKKKAIHMQYGMAGWMAMGYEV

SEQ ID NO: 42589 - protein, 85 aa, unidentified
  REGION 1..85: note = Description of Unknown:cds_NZ_WFIY01000004.1_cds_WP_155864459.1_1725 target sequence
LEALGAIADGRITKVNDHYIVTSSEGDRKYTVKVEGEKVFSDDNGTKFRNYIGYPIIAVLMLEGKLPFDKRISEALKGIDWKKLN

SEQ ID NO: 42590 - protein, 84 aa, unidentified
  REGION 1..84: note = Description of Unknown:cds_NZ_WFIY01000004.1_cds_WP_155864459.1_1725 target sequence
NYIGYPIIAVLMLEGKLPFDKRISEALKGIDWKKLNETYKNYSVVERIIKEKVSKEKGINESEIDGIIESVLNELRRHSFYKAT

SEQ ID NO: 42591 - protein, 85 aa, unidentified
  REGION 1..85: note = Description of Unknown:cds_NZ_WFIY01000004.1_cds_WP_155864459.1_1725 target sequence
RKYTVKVEGEKVFSDDNGTKFRNYIGYPIIAVLMLEGKLPFDKRISEALKGIDWKKLNETYKNYSVVERIIKEKVSKEKGINESE

SEQ ID NO: 42592 - protein, 85 aa, unidentified
  REGION 1..85: note = Description of Unknown:cds_NZ_WFIY01000004.1_cds_WP_155863901.1_1807 target sequence
IISVPDVIYLHSGEYTISISVLPTKTEGEVIEILKSSMKISECKDKLLCYPRIFGGIFIFLRKSILSRIEFDGYLCQGKEGELFD

SEQ ID NO: 42593 - protein, 84 aa, unidentified
  REGION 1..84: note = Description of Unknown:cds_NZ_WFIY01000004.1_cds_WP_155863901.1_1807 target sequence
CYPRIFGGIFIFLRKSILSRIEFDGYLCQGKEGELFDVNKFHESLKNEFSCFKFDNGKIYCFSKVRKDKGCKPIDNIGLRFIVY

SEQ ID NO: 42594 - protein, 85 aa, unidentified
  REGION 1..85: note = Description of Unknown:cds_NZ_WFIY01000004.1_cds_WP_155863901.1_1807 target sequence
GEVIEILKSSMKISECKDKLLCYPRIFGGIFIFLRKSILSRIEFDGYLCQGKEGELFDVNKFHESLKNEFSCFKFDNGKIYCFSK

SEQ ID NO: 42595 - protein, 85 aa, unidentified
  REGION 1..85: note = Description of Unknown:cds_NZ_WFIY01000004.1_cds_WP_155864076.1_2015 target sequence
DVKKTKIVLDSGVILSFLEGEFRDYYEKILNQEIIPYINTVNLTEVYYVLCRKIGKEKAEEIIKSIIKSGYYEIVGVKPKILKYA

SEQ ID NO: 42596 - protein, 84 aa, unidentified
  REGION 1..84: note = Description of Unknown:cds_NZ_WFIY01000004.1_cds_WP_155864076.1_2015 target sequence
VLCRKIGKEKAEEIIKSIIKSGYYEIVGVKPKILKYAAECKCIHSISLADCFSIATAKFLKTRALFRREEELAKKSIEEVEFID

SEQ ID NO: 42597 - protein, 85 aa, unidentified
  REGION 1..85: note = Description of Unknown:cds_NZ_WFIY01000004.1_cds_WP_155864076.1_2015 target sequence
KILNQEIIPYINTVNLTEVYYVLCRKIGKEKAEEIIKSIIKSGYYEIVGVKPKILKYAAECKCIHSISLADCFSIATAKFLKTRA

SEQ ID NO: 42598 - protein, 85 aa, unidentified
  REGION 1..85: note = Description of Unknown:cds_NC_035460.1_cds_YP_009408092.1_141 target sequence
AQWQKIIDDISQNNMFEDAAIVDYKTRKNIIATIPNRTFSNIIPGEVHALTIYPLLLKPLIGRKYFIIYTNSLMDENTYAMELLT

SEQ ID NO: 42599 - protein, 84 aa, unidentified
  REGION 1..84: note = Description of Unknown:cds_NC_035460.1_cds_YP_009408092.1_141 target sequence
ALTIYPLLLKPLIGRKYFIIYTNSLMDENTYAMELLTAYAPVSPVCIARTHTALIFLMGKPNTPRRVVYDTCRKYAEEVRKTGN

SEQ ID NO: 42600 - protein, 85 aa, unidentified
  REGION 1..85: note = Description of Unknown:cds_NC_035460.1_cds_YP_009408092.1_141 target sequence
KNIIATIPNRTFSNIIPGEVHALTIYPLLLKPLIGRKYFIIYTNSLMDENTYAMELLTAYAPVSPVCIARTHTALIFLMGKPNTP

SEQ ID NO: 42601 - protein, 85 aa, unidentified
  REGION 1..85: note = Description of Unknown:cds_NC_029316.1_cds_YP_009230285.1_32 target sequence
ENLFERAVNNFSIIVNSLPDEYKTITISFIQQAVPEVNQTFLEELTKRTEQAVPISKLPKLVNVTLDIVNKLPEFISESEMANVA

SEQ ID NO: 42602 - protein, 84 aa, unidentified
  REGION 1..84: note = Description of Unknown:cds_NC_029316.1_cds_YP_009230285.1_32 target sequence
TEQAVPISKLPKLVNVTLDIVNKLPEFISESEMANVAPEVFAIQAGLQFVSQYILPKLIKVNNTFQLPFEYNNSVSALPRVITQ

SEQ ID NO: 42603 - protein, 85 aa, unidentified
  REGION 1..85: note = Description of Unknown:cds_NC_029316.1_cds_YP_009230285.1_32 target sequence
SFIQQAVPEVNQTFLEELTKRTEQAVPISKLPKLVNVTLDIVNKLPEFISESEMANVAPEVFAIQAGLQFVSQYILPKLIKVNNT

SEQ ID NO: 42604 - protein, 85 aa, unidentified
  REGION 1..85: note = Description of Unknown:cds_NZ_WFIY01000004.1_cds_WP_155862562.1_331 target sequence
LSEIESLIKEIAEKLQKRAESIKSPKYEPESVSEDKFDEILSKNKVVVIDCWADWCAPCHLYEPIFKKIAEKYKDKAFFGRLNVD

SEQ ID NO: 42605 - protein, 84 aa, unidentified
  REGION 1..84: note = Description of Unknown:cds_NZ_WFIY01000004.1_cds_WP_155862562.1_331 target sequence
IDCWADWCAPCHLYEPIFKKIAEKYKDKAFFGRLNVDENQKLADKYNVLNIPTTLIFVDGQLKDSLVGAVDENTLEDTIKKYIP

SEQ ID NO: 42606 - protein, 85 aa, unidentified
  REGION 1..85: note = Description of Unknown:cds_NZ_WFIY01000004.1_cds_WP_155862562.1_331 target sequence
EPESVSEDKFDEILSKNKVVVIDCWADWCAPCHLYEPIFKKIAEKYKDKAFFGRLNVDENQKLADKYNVLNIPTTLIFVDGQLKD

SEQ ID NO: 42607 - protein, 85 aa, unidentified
  REGION 1..85: note = Description of Unknown:cds_NZ_WFIY01000004.1_cds_WP_155863033.1_920 target sequence
LRNYSGRSFNKERGQISQNEPKPLPLGEKCNYLCPYFRCNKRALMIQTKYVKGSPYKVGFCRWVGDTCITGECQYAYCEKRALLP

SEQ ID NO: 42608 - protein, 84 aa, unidentified
  REGION 1..84: note = Description of Unknown:cds_NZ_WFIY01000004.1_cds_WP_155863033.1_920 target sequence
KYVKGSPYKVGFCRWVGDTCITGECQYAYCEKRALLPGNRCAFAVNKRTDGDDMEKELKESDEYEDKVKDIISKKLGKKDLDLI

SEQ ID NO: 42609 - protein, 85 aa, unidentified
  REGION 1..85: note = Description of Unknown:cds_NZ_WFIY01000004.1_cds_WP_155863033.1_920 target sequence
EKCNYLCPYFRCNKRALMIQTKYVKGSPYKVGFCRWVGDTCITGECQYAYCEKRALLPGNRCAFAVNKRTDGDDMEKELKESDEY

SEQ ID NO: 42610 - protein, 85 aa, unidentified
  REGION 1..85: note = Description of Unknown:cds_NZ_WFIY01000004.1_cds_WP_013775465.1_948 target sequence
SSRREIRWGIAHIYASQNNTIISITDITGAEMIAKASGGMVVKADREKPSPYAAMLAANKAAGEALDKGIMAIHIKVRAPGGSGP

SEQ ID NO: 42611 - protein, 84 aa, unidentified
  REGION 1..84: note = Description of Unknown:cds_NZ_WFIY01000004.1_cds_WP_013775465.1_948 target sequence
KPSPYAAMLAANKAAGEALDKGIMAIHIKVRAPGGSGPKTPGPGAQPAIRSLARSGFIIGRIEDVTPIPHDSIRRPGGRRGRRV

SEQ ID NO: 42612 - protein, 85 aa, unidentified
  REGION 1..85: note = Description of Unknown:cds_NZ_WFIY01000004.1_cds_WP_013775465.1_948 target sequence
TGAEMIAKASGGMVVKADREKPSPYAAMLAANKAAGEALDKGIMAIHIKVRAPGGSGPKTPGPGAQPAIRSLARSGFIIGRIEDV

SEQ ID NO: 42613 - protein, 85 aa, unidentified
  REGION 1..85: note = Description of Unknown:cds_NZ_WFIY01000004.1_cds_WP_155863955.1_1876 target sequence
MIEEEIYNKCKKDWNCASSIISSLPFEEDTKKRIMESYVEKFVGKRIFLAQVVTSMIYQCGELNSKKDEINCYLSTYYSGRIEIP

SEQ ID NO: 42614 - protein, 84 aa, unidentified
  REGION 1..84: note = Description of Unknown:cds_NZ_WFIY01000004.1_cds_WP_155863955.1_1876 target sequence
FLAQVVTSMIYQCGELNSKKDEINCYLSTYYSGRIEIPLRENYLILLHSIFRNIIKDNHEEDLLDMCKQGNELACNFVEEISLI

SEQ ID NO: 42615 - protein, 85 aa, unidentified
  REGION 1..85: note = Description of Unknown:cds_NZ_WFIY01000004.1_cds_WP_155863955.1_1876 target sequence
EDTKKRIMESYVEKFVGKRIFLAQVVTSMIYQCGELNSKKDEINCYLSTYYSGRIEIPLRENYLILLHSIFRNIIKDNHEEDLLD

SEQ ID NO: 42616 - protein, 85 aa, unidentified
  REGION 1..85: note = Description of Unknown:cds_NZ_WFIY01000004.1_cds_WP_155864111.1_2062 target sequence
TTIEIIDLIIGFLVAWIIVSIPVWLAAKVFNSRSSFLRAMAASLLAIIVFEIIVAIFIFIAFVIPNPIIVLIGFIIAIIGVLGVF

SEQ ID NO: 42617 - protein, 84 aa, unidentified
  REGION 1..84: note = Description of Unknown:cds_NZ_WFIY01000004.1_cds_WP_155864111.1_2062 target sequence
IVFEIIVAIFIFIAFVIPNPIIVLIGFIIAIIGVLGVFKGVFDVSWLGAFGIAVLAFIIAIIINFVLTAVGLGAFTITHFLKMS

SEQ ID NO: 42618 - protein, 85 aa, unidentified
  REGION 1..85: note = Description of Unknown:cds_NZ_WFIY01000004.1_cds_WP_155864111.1_2062 target sequence
KVFNSRSSFLRAMAASLLAIIVFEIIVAIFIFIAFVIPNPIIVLIGFIIAIIGVLGVFKGVFDVSWLGAFGIAVLAFIIAIIINF

SEQ ID NO: 42619 - protein, 85 aa, unidentified
  REGION 1..85: note = Description of Unknown:cds_NC_035460.1_cds_YP_009408089.1_138 target sequence
GIKFDVLNLLIDHHSTTNNIPNNKFLLKFINLCNEYTLTRKNKYLLQIHKLLLITPKHLMYYIWYPLSKLCDNETYDNMNNMKWT

SEQ ID NO: 42620 - protein, 84 aa, unidentified
  REGION 1..84: note = Description of Unknown:cds_NC_035460.1_cds_YP_009408089.1_138 target sequence
IHKLLLITPKHLMYYIWYPLSKLCDNETYDNMNNMKWTIKKIKTLHTATKFDNVFIGNVVFITIHNINNNISKFCINLLNNKLL

SEQ ID NO: 42621 - protein, 85 aa, unidentified
  REGION 1..85: note = Description of Unknown:cds_NC_035460.1_cds_YP_009408089.1_138 target sequence
KFINLCNEYTLTRKNKYLLQIHKLLLITPKHLMYYIWYPLSKLCDNETYDNMNNMKWTIKKIKTLHTATKFDNVFIGNVVFITIH

SEQ ID NO: 42622 - protein, 85 aa, unidentified
  REGION 1..85: note = Description of Unknown:cds_NC_005830.1_cds_YP_003749.1_24 target sequence
VNKKYRQDSKDRYQYKQYIYRSIGGIVPPEMAETVTANQTAQWEAGFTPYHKLRLAIKEICKTDGIPNIKWGMYIAFGEKLLKSY

SEQ ID NO: 42623 - protein, 84 aa, unidentified
  REGION 1..84: note = Description of Unknown:cds_NC_005830.1_cds_YP_003749.1_24 target sequence
TPYHKLRLAIKEICKTDGIPNIKWGMYIAFGEKLLKSYLKMKAGSASSDMIAEYINNAISAFSSRTGISQETAQKIADFITSNY

SEQ ID NO: 42624 - protein, 85 aa, unidentified
  REGION 1..85: note = Description of Unknown:cds_NC_005830.1_cds_YP_003749.1_24 target sequence
PPEMAETVTANQTAQWEAGFTPYHKLRLAIKEICKTDGIPNIKWGMYIAFGEKLLKSYLKMKAGSASSDMIAEYINNAISAFSSR

SEQ ID NO: 42625 - protein, 85 aa, unidentified
  REGION 1..85: note = Description of Unknown:cds_NC_010495.1_cds_YP_001742063.1_26 target sequence
PAKLTGVREAIARTSQIVDEIIATKAVRALKSATYIIRTESATLTPIDTSTLINSQFDTVEVNGTRITGKVGYSAKYALHVHNAS

SEQ ID NO: 42626 - protein, 84 aa, unidentified
  REGION 1..84: note = Description of Unknown:cds_NC_010495.1_cds_YP_001742063.1_26 target sequence
DTSTLINSQFDTVEVNGTRITGKVGYSAKYALHVHNASGKLSGKPRSNGNGTYWSPGAEPQFLTKAAQRTKDLVDSVIKKEMTL

SEQ ID NO: 42627 - protein, 85 aa, unidentified
  REGION 1..85: note = Description of Unknown:cds_NC_010495.1_cds_YP_001742063.1_26 target sequence
RALKSATYIIRTESATLTPIDTSTLINSQFDTVEVNGTRITGKVGYSAKYALHVHNASGKLSGKPRSNGNGTYWSPGAEPQFLTK

SEQ ID NO: 42628 - protein, 85 aa, unidentified
  REGION 1..85: note = Description of Unknown:hvTR_F5HBL8 target sequence
AAPRGRPKKDLTMEDLTAKISQLTVENRELRKALGSTADPRDRPLTATEKEAQLTATVGALSAAAAKKIEARVRTIFSKVVTQKQ

SEQ ID NO: 42629 - protein, 84 aa, unidentified
  REGION 1..84: note = Description of Unknown:hvTR_F5HBL8 target sequence
ATEKEAQLTATVGALSAAAAKKIEARVRTIFSKVVTQKQVDDALKGLSLRIDVCMSDGGTAKPPPGANNRRRRGASTTRAGVDD

SEQ ID NO: 42630 - protein, 85 aa, unidentified
  REGION 1..85: note = Description of Unknown:hvTR_F5HBL8 target sequence
RELRKALGSTADPRDRPLTATEKEAQLTATVGALSAAAAKKIEARVRTIFSKVVTQKQVDDALKGLSLRIDVCMSDGGTAKPPPG

SEQ ID NO: 42631 - protein, 85 aa, unidentified
  REGION 1..85: note = Description of Unknown:vpeps_5VMN_1 target sequence
GPLGSMTNINFSALLRGERMCPLTREIHSQMLIVTKSYSLVETFRAFPRLPNILEIGNNIVSDGNLNWGRILILLGISQLYFTKS

SEQ ID NO: 42632 - protein, 85 aa, unidentified
  REGION 1..85: note = Description of Unknown:vpeps_5VMN_1 target sequence
PRLPNILEIGNNIVSDGNLNWGRILILLGISQLYFTKSESESERTQITEQLERFFRQDAISNWIASNGGWVTCASLDLRNYSSVT

SEQ ID NO: 42633 - protein, 85 aa, unidentified
  REGION 1..85: note = Description of Unknown:vpeps_5VMN_1 target sequence
HSQMLIVTKSYSLVETFRAFPRLPNILEIGNNIVSDGNLNWGRILILLGISQLYFTKSESESERTQITEQLERFFRQDAISNWIA

SEQ ID NO: 42634 - protein, 85 aa, unidentified
  REGION 1..85: note = Description of Unknown:cds_NZ_WFIY01000004.1_cds_WP_155862331.1_57 target sequence
NTINTLFKYSFVDLIALISTFSLGFAKSFINFGILAESLLYLHISLALISFLLAIVLLKLSFSTGLEFPKIASMVSFSSIVLAGS

SEQ ID NO: 42635 - protein, 84 aa, unidentified
  REGION 1..84: note = Description of Unknown:cds_NZ_WFIY01000004.1_cds_WP_155862331.1_57 target sequence
ALISFLLAIVLLKLSFSTGLEFPKIASMVSFSSIVLAGSSGITFLLTNNNLFSHIMLGAFEVALISTSLLIGYLTCFFRLCKRY

SEQ ID NO: 42636 - protein, 85 aa, unidentified
  REGION 1..85: note = Description of Unknown:cds_NZ_WFIY01000004.1_cds_WP_155862331.1_57 target sequence
SFINFGILAESLLYLHISLALISFLLAIVLLKLSFSTGLEFPKIASMVSFSSIVLAGSSGITFLLTNNNLFSHIMLGAFEVALIS

SEQ ID NO: 42637 - protein, 85 aa, unidentified
  REGION 1..85: note = Description of Unknown:cds_NZ_WFIY01000004.1_cds_WP_013776220.1_178 target sequence
GVNYAKVGDLKEGNYIVIDGEPCRVVEITKAKTGKHGAAKANVVAVSIFTGAKKTLMAPVDDQVEIPIIEKHVGQILADMGDKIQ

SEQ ID NO: 42638 - protein, 84 aa, unidentified
  REGION 1..84: note = Description of Unknown:cds_NZ_WFIY01000004.1_cds_WP_013776220.1_178 target sequence
SIFTGAKKTLMAPVDDQVEIPIIEKHVGQILADMGDKIQVMDMDTYETFEMEKPKEEDLASKIRPGAEVEYWTIMGRRKIVRVK

SEQ ID NO: 42639 - protein, 85 aa, unidentified
  REGION 1..85: note = Description of Unknown:cds_NZ_WFIY01000004.1_cds_WP_013776220.1_178 target sequence
ITKAKTGKHGAAKANVVAVSIFTGAKKTLMAPVDDQVEIPIIEKHVGQILADMGDKIQVMDMDTYETFEMEKPKEEDLASKIRPG

SEQ ID NO: 42640 - protein, 85 aa, unidentified
  REGION 1..85: note = Description of Unknown:cds_NZ_WFIY01000004.1_cds_WP_155862525.1_289 target sequence
RILVVDDIGNVLGVFSSEDEAYNFAKEKMKEGKKIHLKVQRERLLALDEKGKEIGEFKNVDEAYEFLKDKVKEGEKVRIVIGNKD

SEQ ID NO: 42641 - protein, 84 aa, unidentified
  REGION 1..84: note = Description of Unknown:cds_NZ_WFIY01000004.1_cds_WP_155862525.1_289 target sequence
LDEKGKEIGEFKNVDEAYEFLKDKVKEGEKVRIVIGNKDFYVTDDIGNVLGVFSSEDEAYNFAKEKMKEGKKIRIIAPAELYTK

SEQ ID NO: 42642 - protein, 85 aa, unidentified
  REGION 1..85: note = Description of Unknown:cds_NZ_WFIY01000004.1_cds_WP_155862525.1_289 target sequence
KMKEGKKIHLKVQRERLLALDEKGKEIGEFKNVDEAYEFLKDKVKEGEKVRIVIGNKDFYVTDDIGNVLGVFSSEDEAYNFAKEK

SEQ ID NO: 42643 - protein, 85 aa, unidentified
  REGION 1..85: note = Description of Unknown:cds_NZ_WFIY01000004.1_cds_WP_155862710.1_510 target sequence
NVEKISVSIPKDIMEQLDKFMKTSSSLDRSKIFQIAIKNFLDENSLEDVDVVGIINIVYDDEVTDEITKLQHEKLSSIISTLHIH

SEQ ID NO: 42644 - protein, 84 aa, unidentified
  REGION 1..84: note = Description of Unknown:cds_NZ_WFIY01000004.1_cds_WP_155862710.1_510 target sequence
EDVDVVGIINIVYDDEVTDEITKLQHEKLSSIISTLHIHLNERECMEAIAVKGKKSDLVKLTSSLSQIKGVKKAKLLTYEVKEK

SEQ ID NO: 42645 - protein, 85 aa, unidentified
  REGION 1..85: note = Description of Unknown:cds_NZ_WFIY01000004.1_cds_WP_155862710.1_510 target sequence
DRSKIFQIAIKNFLDENSLEDVDVVGIINIVYDDEVTDEITKLQHEKLSSIISTLHIHLNERECMEAIAVKGKKSDLVKLTSSLS

SEQ ID NO: 42646 - protein, 85 aa, unidentified
  REGION 1..85: note = Description of Unknown:cds_NZ_WFIY01000004.1_cds_WP_155862725.1_527 target sequence
EEVVKEYMKSNVISVEKSLTLKEVTEIMTKNNVGSVIVVDHGKPVGIITEKDVVRALGSGKDLNTKAEEIMTASLITIREDAPIT

SEQ ID NO: 42647 - protein, 84 aa, unidentified
  REGION 1..84: note = Description of Unknown:cds_NZ_WFIY01000004.1_cds_WP_155862725.1_527 target sequence
IITEKDVVRALGSGKDLNTKAEEIMTASLITIREDAPITGALSLMRTNNIRHLPVVNEDGKLTGILSIRDVARALDDMYENYLD

SEQ ID NO: 42648 - protein, 85 aa, unidentified
  REGION 1..85: note = Description of Unknown:cds_NZ_WFIY01000004.1_cds_WP_155862725.1_527 target sequence
MTKNNVGSVIVVDHGKPVGIITEKDVVRALGSGKDLNTKAEEIMTASLITIREDAPITGALSLMRTNNIRHLPVVNEDGKLTGIL

SEQ ID NO: 42649 - protein, 85 aa, unidentified
  REGION 1..85: note = Description of Unknown:cds_NZ_WFIY01000004.1_cds_WP_155862982.1_852 target sequence
QETDLSDEKLLEIAKNAARNSYAPYSNIHVGAVIVTDDGKTFTGTNIENSSYGLSICAERVAVFNAVSNGYRKFKKIAVITSDGK

SEQ ID NO: 42650 - protein, 84 aa, unidentified
  REGION 1..84: note = Description of Unknown:cds_NZ_WFIY01000004.1_cds_WP_155862982.1_852 target sequence
IENSSYGLSICAERVAVFNAVSNGYRKFKKIAVITSDGKGIMPCGACRQVLAEFSENMEVITLDKDGNVIRFKLNDLLPHAFRL

SEQ ID NO: 42651 - protein, 85 aa, unidentified
  REGION 1..85: note = Description of Unknown:cds_NZ_WFIY01000004.1_cds_WP_155862982.1_852 target sequence
IHVGAVIVTDDGKTFTGTNIENSSYGLSICAERVAVFNAVSNGYRKFKKIAVITSDGKGIMPCGACRQVLAEFSENMEVITLDKD

SEQ ID NO: 42652 - protein, 85 aa, unidentified
  REGION 1..85: note = Description of Unknown:cds_NZ_WFIY01000004.1_cds_WP_170283904.1_1104 target sequence
LMRYSHRELQYLLIIKRYNDSGRPARLTSIAKDINVAPASAFEELNHLAEKGLIIKDKSEIWITDEGKQYIIKAIRAHRVIESFL

SEQ ID NO: 42653 - protein, 84 aa, unidentified
  REGION 1..84: note = Description of Unknown:cds_NZ_WFIY01000004.1_cds_WP_170283904.1_1104 target sequence
LAEKGLIIKDKSEIWITDEGKQYIIKAIRAHRVIESFLVKLGMSKDEACKYSKQFDLMVPEEIIEKLYIFLGKPSNCPHGEEIP

SEQ ID NO: 42654 - protein, 85 aa, unidentified
  REGION 1..85: note = Description of Unknown:cds_NZ_WFIY01000004.1_cds_WP_170283904.1_1104 target sequence
TSIAKDINVAPASAFEELNHLAEKGLIIKDKSEIWITDEGKQYIIKAIRAHRVIESFLVKLGMSKDEACKYSKQFDLMVPEEIIE

SEQ ID NO: 42655 - protein, 85 aa, unidentified
  REGION 1..85: note = Description of Unknown:cds_NZ_WFIY01000004.1_cds_1997 target sequence
IVIDGTLLSAVILKQSDWEKLAELIPNSSTLDIAVMETLNAITNARKRKVIDEEVANKLFEALNEFANSMKIYESKYYLEKAFKL

SEQ ID NO: 42656 - protein, 84 aa, unidentified
  REGION 1..84: note = Description of Unknown:cds_NZ_WFIY01000004.1_cds_1997 target sequence
RKVIDEEVANKLFEALNEFANSMKIYESKYYLEKAFKLAIKYGINTYSALYLALAEDLNLSLATLDVKQAKVAGKMGIEVINIK

SEQ ID NO: 42657 - protein, 85 aa, unidentified
  REGION 1..85: note = Description of Unknown:cds_NZ_WFIY01000004.1_cds_1997 target sequence
SSTLDIAVMETLNAITNARKRKVIDEEVANKLFEALNEFANSMKIYESKYYLEKAFKLAIKYGINTYSALYLALAEDLNLSLATL

SEQ ID NO: 42658 - protein, 85 aa, unidentified
  REGION 1..85: note = Description of Unknown:cds_NZ_WFIY01000004.1_cds_WP_155864304.1_2299 target sequence
VEGLERQLRLVRISGGVLYLVNIFFSSSLYTALESLGLAKGSFIYSLLFAVPLFSAILNGIILGLIAAQLKDAVIYGIVKSAMAI

SEQ ID NO: 42659 - protein, 84 aa, unidentified
  REGION 1..84: note = Description of Unknown:cds_NZ_WFIY01000004.1_cds_WP_155864304.1_2299 target sequence
LFAVPLFSAILNGIILGLIAAQLKDAVIYGIVKSAMAIIVYLLYLHFFVLPSYIVFMIIIIMGLSVIQLGILYLYRRIQKQIFG

SEQ ID NO: 42660 - protein, 85 aa, unidentified
  REGION 1..85: note = Description of Unknown:cds_NZ_WFIY01000004.1_cds_WP_155864304.1_2299 target sequence
SLYTALESLGLAKGSFIYSLLFAVPLFSAILNGIILGLIAAQLKDAVIYGIVKSAMAIIVYLLYLHFFVLPSYIVFMIIIIMGLS

SEQ ID NO: 42661 - protein, 85 aa, unidentified
  REGION 1..85: note = Description of Unknown:cds_NC_003214.2_cds_NP_445698.1_33 target sequence
SEQKPEQDVNKKIEELEKKVQELQEQLEKTKQAVKTVASILDNHLKGQWTLEDVKIAITHINEMVQLLTQSGIIRPGSEGSGNWL

SEQ ID NO: 42662 - protein, 84 aa, unidentified
  REGION 1..84: note = Description of Unknown:cds_NC_003214.2_cds_NP_445698.1_33 target sequence
GQWTLEDVKIAITHINEMVQLLTQSGIIRPGSEGSGNWLQMMLAQQFMQQKQAQQSQDVQIEPLKKKNKKKLKKFLDEEAEEEE

SEQ ID NO: 42663 - protein, 85 aa, unidentified
  REGION 1..85: note = Description of Unknown:cds_NC_003214.2_cds_NP_445698.1_33 target sequence
EKTKQAVKTVASILDNHLKGQWTLEDVKIAITHINEMVQLLTQSGIIRPGSEGSGNWLQMMLAQQFMQQKQAQQSQDVQIEPLKK

SEQ ID NO: 42664 - protein, 85 aa, unidentified
  REGION 1..85: note = Description of Unknown:cds_NC_029316.1_cds_YP_009230292.1_39 target sequence
VSIFIRSKKFVICPICEQTKYEQRIIFKNEQRIDVAVYFQKVPKYVRVYLPIVGLITNVYLSDALFITISPYKEITSKTRVLVNP

SEQ ID NO: 42665 - protein, 84 aa, unidentified
  REGION 1..84: note = Description of Unknown:cds_NC_029316.1_cds_YP_009230292.1_39 target sequence
VYLPIVGLITNVYLSDALFITISPYKEITSKTRVLVNPSFPITTVLNEGNNILRLVFGTKEATLPGVYIVKKELPTSIILEKLF

SEQ ID NO: 42666 - protein, 85 aa, unidentified
  REGION 1..85: note = Description of Unknown:cds_NC_029316.1_cds_YP_009230292.1_39 target sequence
KNEQRIDVAVYFQKVPKYVRVYLPIVGLITNVYLSDALFITISPYKEITSKTRVLVNPSFPITTVLNEGNNILRLVFGTKEATLP

SEQ ID NO: 42667 - protein, 85 aa, unidentified
  REGION 1..85: note = Description of Unknown:cds_NC_007409.1_cds_YP_319893.1_62 target sequence
AKYEPKKGDYAGGAVKILDMFENGQLGYPEVTLKLAGEEANARRAGDERTKEAIHAIVKMISDAMKPYRNKGSGFQSQPIPGEVI

SEQ ID NO: 42668 - protein, 84 aa, unidentified
  REGION 1..84: note = Description of Unknown:cds_NC_007409.1_cds_YP_319893.1_62 target sequence
DERTKEAIHAIVKMISDAMKPYRNKGSGFQSQPIPGEVIAQVTSNPEYQQAKAFLASPATQVRNIEREEVLSKGAKKLAQAMAS

SEQ ID NO: 42669 - protein, 85 aa, unidentified
  REGION 1..85: note = Description of Unknown:cds_NC_007409.1_cds_YP_319893.1_62 target sequence
YPEVTLKLAGEEANARRAGDERTKEAIHAIVKMISDAMKPYRNKGSGFQSQPIPGEVIAQVTSNPEYQQAKAFLASPATQVRNIE

SEQ ID NO: 42670 - protein, 85 aa, unidentified
  REGION 1..85: note = Description of Unknown:hvTR_Q9JFM0 target sequence
TDHHLDLEMDGRASEQRILQLHVRQQQERAAKELLDAINIHQCKKGIFCLVKQAKITYELLSGGKQHRLAYELPQQKQKFTCMVG

SEQ ID NO: 42671 - protein, 84 aa, unidentified
  REGION 1..84: note = Description of Unknown:hvTR_Q9JFM0 target sequence
GIFCLVKQAKITYELLSGGKQHRLAYELPQQKQKFTCMVGVNPIVITQQSGETSGCIHCSCESPECIYSLLKTLCGLRNLLPTN

SEQ ID NO: 42672 - protein, 85 aa, unidentified
  REGION 1..85: note = Description of Unknown:hvTR_Q9JFM0 target sequence
ERAAKELLDAINIHQCKKGIFCLVKQAKITYELLSGGKQHRLAYELPQQKQKFTCMVGVNPIVITQQSGETSGCIHCSCESPECI

SEQ ID NO: 42673 - protein, 85 aa, unidentified
  REGION 1..85: note = Description of Unknown:hvTR_P18098 target sequence
ETPLKAPESSLKPYNEPSSCTSERDVTAQELAKQGEELLAQLHRPLEPCTNKCYCKRCSFHCQLCFSKKGLGISYERKGRRRRTP

SEQ ID NO: 42674 - protein, 84 aa, unidentified
  REGION 1..84: note = Description of Unknown:hvTR_P18098 target sequence
LEPCTNKCYCKRCSFHCQLCFSKKGLGISYERKGRRRRTPRKTKTPSPSAPDKSISTRTGDSQPTKEQKKTSEATVVTTCGLGQ

SEQ ID NO: 42675 - protein, 85 aa, unidentified
  REGION 1..85: note = Description of Unknown:hvTR_P18098 target sequence
AQELAKQGEELLAQLHRPLEPCTNKCYCKRCSFHCQLCFSKKGLGISYERKGRRRRTPRKTKTPSPSAPDKSISTRTGDSQPTKE

SEQ ID NO: 42676 - protein, 85 aa, unidentified
  REGION 1..85: note = Description of Unknown:vpeps_2X5C_1 target sequence
GMGETPEGPMPNKKGKSEGGQIRTIPLKYYKQEYDMAADLVRMLRGLGVFMHAKCPRCGAEGSVSIVETKNGYKYLVIRHPDGGT

SEQ ID NO: 42677 - protein, 85 aa, unidentified
  REGION 1..85: note = Description of Unknown:vpeps_2X5C_1 target sequence
LGVFMHAKCPRCGAEGSVSIVETKNGYKYLVIRHPDGGTHTVPKTDISAILKELCEVKKDLEYVLKRYKEYEEEGGVKFCAEGRK

SEQ ID NO: 42678 - protein, 85 aa, unidentified
  REGION 1..85: note = Description of Unknown:vpeps_2X5C_1 target sequence
KYYKQEYDMAADLVRMLRGLGVFMHAKCPRCGAEGSVSIVETKNGYKYLVIRHPDGGTHTVPKTDISAILKELCEVKKDLEYVLK

SEQ ID NO: 42679 - protein, 85 aa, unidentified
  REGION 1..85: note = Description of Unknown:cds_NZ_WFIY01000004.1_cds_WP_155862423.1_165 target sequence
HKTTYFIDSNVFVYAKIGDKKYGKCSQEIIKAIYKGKIEAIIDTVVLLEVANALRKLKVKDVEEEILAILSLPIQVVEVTKEDII

SEQ ID NO: 42680 - protein, 84 aa, unidentified
  REGION 1..84: note = Description of Unknown:cds_NZ_WFIY01000004.1_cds_WP_155862423.1_165 target sequence
VLLEVANALRKLKVKDVEEEILAILSLPIQVVEVTKEDIIQAVKEDDLSPYDALHYVISKKSSAKIITADQDFKERIDPCSFSL

SEQ ID NO: 42681 - protein, 85 aa, unidentified
  REGION 1..85: note = Description of Unknown:cds_NZ_WFIY01000004.1_cds_WP_155862423.1_165 target sequence
EIIKAIYKGKIEAIIDTVVLLEVANALRKLKVKDVEEEILAILSLPIQVVEVTKEDIIQAVKEDDLSPYDALHYVISKKSSAKII

SEQ ID NO: 42682 - protein, 85 aa, unidentified
  REGION 1..85: note = Description of Unknown:cds_NZ_WFIY01000004.1_cds_WP_155862701.1_501 target sequence
NKKLLLALGIVILLLTAVGVYMASSYRTTISITNLPSSSSNEETLEVKVLINYGPLGGVSPLSDAYVEIYNSQGYYVTANFTNSQ

SEQ ID NO: 42683 - protein, 84 aa, unidentified
  REGION 1..84: note = Description of Unknown:cds_NZ_WFIY01000004.1_cds_WP_155862701.1_501 target sequence
EVKVLINYGPLGGVSPLSDAYVEIYNSQGYYVTANFTNSQGVATFHLPPGNYKVFVTQLHCSVNVSLNSSKEVTISYAYLYAPK

SEQ ID NO: 42684 - protein, 85 aa, unidentified
  REGION 1..85: note = Description of Unknown:cds_NZ_WFIY01000004.1_cds_WP_155862701.1_501 target sequence
TTISITNLPSSSSNEETLEVKVLINYGPLGGVSPLSDAYVEIYNSQGYYVTANFTNSQGVATFHLPPGNYKVFVTQLHCSVNVSL

SEQ ID NO: 42685 - protein, 85 aa, unidentified
  REGION 1..85: note = Description of Unknown:cds_NZ_WFIY01000004.1_cds_WP_155862713.1_513 target sequence
KVVLAYDGSDYSKKAVFFALRFLKKEDEIHIVTVVKEAPKSPEQVIIDSEEKAKRSIDEIKSELEGYNVKEKILESNDVADSLID

SEQ ID NO: 42686 - protein, 84 aa, unidentified
  REGION 1..84: note = Description of Unknown:cds_NZ_WFIY01000004.1_cds_WP_155862713.1_513 target sequence
IIDSEEKAKRSIDEIKSELEGYNVKEKILESNDVADSLIDYCKEIGCDLIVTGSRGLTGLKKVILGSVSSALVSKSPYPVLVVK

SEQ ID NO: 42687 - protein, 85 aa, unidentified
  REGION 1..85: note = Description of Unknown:cds_NZ_WFIY01000004.1_cds_WP_155862713.1_513 target sequence
EIHIVTVVKEAPKSPEQVIIDSEEKAKRSIDEIKSELEGYNVKEKILESNDVADSLIDYCKEIGCDLIVTGSRGLTGLKKVILGS

SEQ ID NO: 42688 - protein, 85 aa, unidentified
  REGION 1..85: note = Description of Unknown:cds_NZ_WFIY01000004.1_cds_WP_155862819.1_648 target sequence
NLADKILALLYDRGELTSSEIADSLREDEENVGLTLKGMEKEGLVFEKEKGLIFKKKVYSLTPTGLEKAKKAKEELEEKANKLMT

SEQ ID NO: 42689 - protein, 84 aa, unidentified
  REGION 1..84: note = Description of Unknown:cds_NZ_WFIY01000004.1_cds_WP_155862819.1_648 target sequence
FEKEKGLIFKKKVYSLTPTGLEKAKKAKEELEEKANKLMTAIQQGEDPQVIVQEYADLIPLMLAMSLIDMMMLQDLMFIDFMNF

SEQ ID NO: 42690 - protein, 85 aa, unidentified
  REGION 1..85: note = Description of Unknown:cds_NZ_WFIY01000004.1_cds_WP_155862819.1_648 target sequence
DEENVGLTLKGMEKEGLVFEKEKGLIFKKKVYSLTPTGLEKAKKAKEELEEKANKLMTAIQQGEDPQVIVQEYADLIPLMLAMSL

SEQ ID NO: 42691 - protein, 85 aa, unidentified
  REGION 1..85: note = Description of Unknown:cds_NZ_WFIY01000004.1_cds_WP_155863140.1_1062 target sequence
SELNDLMKKILIHIYKYGPDNPWYMARRLLGESGWAPKYNEDEIDAACRKLEEMGYLVRFQGALKKSVTSSVKPWLKVKAKELGH

SEQ ID NO: 42692 - protein, 84 aa, unidentified
  REGION 1..84: note = Description of Unknown:cds_NZ_WFIY01000004.1_cds_WP_155863140.1_1062 target sequence
AACRKLEEMGYLVRFQGALKKSVTSSVKPWLKVKAKELGHKPKGIYFDLSKEGRRIASDLYKEYKRSLESANKSSQKTNNKKKS

SEQ ID NO: 42693 - protein, 85 aa, unidentified
  REGION 1..85: note = Description of Unknown:cds_NZ_WFIY01000004.1_cds_WP_155863140.1_1062 target sequence
RLLGESGWAPKYNEDEIDAACRKLEEMGYLVRFQGALKKSVTSSVKPWLKVKAKELGHKPKGIYFDLSKEGRRIASDLYKEYKRS

SEQ ID NO: 42694 - protein, 85 aa, unidentified
  REGION 1..85: note = Description of Unknown:cds_NZ_WFIY01000004.1_cds_WP_155863236.1_1184 target sequence
LIKSLAYKVFWAGRYLERIENISRMSLLAIDKGVDISSTPSYLGINDDIQKYLISNFEILRENIRAFGNEKVMNALSSLEGAIYS

SEQ ID NO: 42695 - protein, 84 aa, unidentified
  REGION 1..84: note = Description of Unknown:cds_NZ_WFIY01000004.1_cds_WP_155863236.1_1184 target sequence
DDIQKYLISNFEILRENIRAFGNEKVMNALSSLEGAIYSSTSDLRGYFSAVLKSTLYLGEVIEDQLKPVITTTLPRKQEEIKTQ

SEQ ID NO: 42696 - protein, 85 aa, unidentified
  REGION 1..85: note = Description of Unknown:cds_NZ_WFIY01000004.1_cds_WP_155863236.1_1184 target sequence
LAIDKGVDISSTPSYLGINDDIQKYLISNFEILRENIRAFGNEKVMNALSSLEGAIYSSTSDLRGYFSAVLKSTLYLGEVIEDQL

SEQ ID NO: 42697 - protein, 85 aa, unidentified
  REGION 1..85: note = Description of Unknown:cds_NZ_WFIY01000004.1_cds_WP_155864200.1_2163 target sequence
KFLIREGSSFSYYYLVRDSSTSKVFKASVTLGEFDDLILKKINAEYKRTKKTISTDNERIFKILVVYGGVRQTMRKVLASRINKL

SEQ ID NO: 42698 - protein, 84 aa, unidentified
  REGION 1..84: note = Description of Unknown:cds_NZ_WFIY01000004.1_cds_WP_155864200.1_2163 target sequence
YKRTKKTISTDNERIFKILVVYGGVRQTMRKVLASRINKLSDVLINMDEFSLHYWYSEFLTRFSRRNNVVDTYRVGRAFRDLYE

SEQ ID NO: 42699 - protein, 85 aa, unidentified
  REGION 1..85: note = Description of Unknown:cds_NZ_WFIY01000004.1_cds_WP_155864200.1_2163 target sequence
SVTLGEFDDLILKKINAEYKRTKKTISTDNERIFKILVVYGGVRQTMRKVLASRINKLSDVLINMDEFSLHYWYSEFLTRFSRRN

SEQ ID NO: 42700 - protein, 85 aa, unidentified
  REGION 1..85: note = Description of Unknown:cds_NZ_WFIY01000004.1_cds_WP_155864266.1_2258 target sequence
TSKGKYIDINVFVYYLTGDNIHGERAKKWLSIKDVKYTSIITPFLLIIVLSKMLGKSLKDYNFVKTVITALESLGIEYLDLPEWS

SEQ ID NO: 42701 - protein, 84 aa, unidentified
  REGION 1..84: note = Description of Unknown:cds_NZ_WFIY01000004.1_cds_WP_155864266.1_2258 target sequence
LIIVLSKMLGKSLKDYNFVKTVITALESLGIEYLDLPEWSKIIENVRKYNIDVEDSIHVTTALENGLEIISNDEELKKKVNAEF

SEQ ID NO: 42702 - protein, 85 aa, unidentified
  REGION 1..85: note = Description of Unknown:cds_NZ_WFIY01000004.1_cds_WP_155864266.1_2258 target sequence
KWLSIKDVKYTSIITPFLLIIVLSKMLGKSLKDYNFVKTVITALESLGIEYLDLPEWSKIIENVRKYNIDVEDSIHVTTALENGL

SEQ ID NO: 42703 - protein, 85 aa, unidentified
  REGION 1..85: note = Description of Unknown:cds_NC_003214.2_cds_NP_445713.1_48 target sequence
SEPNQLTRDQMTEIVKNIVVSVDVNENAVVISAKRLLSYFLKNVEGLEKILKVDVDKDNSIVVYASVKPTNPNLKSIILKVAVKE

SEQ ID NO: 42704 - protein, 84 aa, unidentified
  REGION 1..84: note = Description of Unknown:cds_NC_003214.2_cds_NP_445713.1_48 target sequence
GLEKILKVDVDKDNSIVVYASVKPTNPNLKSIILKVAVKESAFNLSQFKHEIIKAGDDVNIKIYVQQNESRTLAKNSSEEEVDF

SEQ ID NO: 42705 - protein, 85 aa, unidentified
  REGION 1..85: note = Description of Unknown:cds_NC_003214.2_cds_NP_445713.1_48 target sequence
AVVISAKRLLSYFLKNVEGLEKILKVDVDKDNSIVVYASVKPTNPNLKSIILKVAVKESAFNLSQFKHEIIKAGDDVNIKIYVQQ

SEQ ID NO: 42706 - protein, 85 aa, unidentified
  REGION 1..85: note = Description of Unknown:vpeps_2WB6_1 target sequence
SYYHHHHHHLESTSLYKKAGSENLYFQGIVDKNKIVIPMSEFLDSMFLVIEKLGVHAEKKGSMIFLSSERVKLADWKQLGAMCSD

SEQ ID NO: 42707 - protein, 85 aa, unidentified
  REGION 1..85: note = Description of Unknown:vpeps_2WB6_1 target sequence
SMFLVIEKLGVHAEKKGSMIFLSSERVKLADWKQLGAMCSDCYHCKLPLSSFIEIVTRKAKDKFLVMYNEKEVTLVARGVQTIQK

SEQ ID NO: 42708 - protein, 85 aa, unidentified
  REGION 1..85: note = Description of Unknown:vpeps_2WB6_1 target sequence
GIVDKNKIVIPMSEFLDSMFLVIEKLGVHAEKKGSMIFLSSERVKLADWKQLGAMCSDCYHCKLPLSSFIEIVTRKAKDKFLVMY

SEQ ID NO: 42709 - protein, 85 aa, unidentified
  REGION 1..85: note = Description of Unknown:cds_NZ_WFIY01000004.1_cds_WP_155862420.1_161 target sequence
KVVKYYVNVKVELKEGKNVDAEKVKLEGILKRFSKKKKGEDKEEPKLTVTDHTIELSGIRFRERIGFRNFVNELAQKYEAKCTPL

SEQ ID NO: 42710 - protein, 84 aa, unidentified
  REGION 1..84: note = Description of Unknown:cds_NZ_WFIY01000004.1_cds_WP_155862420.1_161 target sequence
PKLTVTDHTIELSGIRFRERIGFRNFVNELAQKYEAKCTPLNEANGKLTVQCEGENAKISFEANVVRFKKPKKEEGEKKEEAKT

SEQ ID NO: 42711 - protein, 85 aa, unidentified
  REGION 1..85: note = Description of Unknown:cds_NZ_WFIY01000004.1_cds_WP_155862420.1_161 target sequence
GILKRFSKKKKGEDKEEPKLTVTDHTIELSGIRFRERIGFRNFVNELAQKYEAKCTPLNEANGKLTVQCEGENAKISFEANVVRF

SEQ ID NO: 42712 - protein, 85 aa, unidentified
  REGION 1..85: note = Description of Unknown:cds_NZ_WFIY01000004.1_cds_WP_155862621.1_400 target sequence
SLVQALVAFGLPSILTLALGYGGYKIISLMVPHNPTPVKISRFEAGNIPYGEGRLWFPLQYYGYLLMYVTIEPILILLFAIASVP

SEQ ID NO: 42713 - protein, 84 aa, unidentified
  REGION 1..84: note = Description of Unknown:cds_NZ_WFIY01000004.1_cds_WP_155862621.1_400 target sequence
AGNIPYGEGRLWFPLQYYGYLLMYVTIEPILILLFAIASVPLLGNFILFRNLMIIIGSFIVLIYPVMYYSITQINMIQNWELRQ

SEQ ID NO: 42714 - protein, 85 aa, unidentified
  REGION 1..85: note = Description of Unknown:cds_NZ_WFIY01000004.1_cds_WP_155862621.1_400 target sequence
SLMVPHNPTPVKISRFEAGNIPYGEGRLWFPLQYYGYLLMYVTIEPILILLFAIASVPLLGNFILFRNLMIIIGSFIVLIYPVMY

SEQ ID NO: 42715 - protein, 85 aa, unidentified
  REGION 1..85: note = Description of Unknown:cds_NZ_WFIY01000004.1_cds_WP_155862795.1_615 target sequence
GVFKKEKIYPGQHNLQAIIQEFTQYLQNDGWKVQQKTEGNIAIIQAQKGGILRDIFAADRALQFSFEQTPEGLKVTVGIGKWVQN

SEQ ID NO: 42716 - protein, 84 aa, unidentified
  REGION 1..84: note = Description of Unknown:cds_NZ_WFIY01000004.1_cds_WP_155862795.1_615 target sequence
QAQKGGILRDIFAADRALQFSFEQTPEGLKVTVGIGKWVQNLAVTAVEAIIYLPLLAIDIPEMVWTEHVESKLMKELDRIVSST

SEQ ID NO: 42717 - protein, 85 aa, unidentified
  REGION 1..85: note = Description of Unknown:cds_NZ_WFIY01000004.1_cds_WP_155862795.1_615 target sequence
NDGWKVQQKTEGNIAIIQAQKGGILRDIFAADRALQFSFEQTPEGLKVTVGIGKWVQNLAVTAVEAIIYLPLLAIDIPEMVWTEH

SEQ ID NO: 42718 - protein, 85 aa, unidentified
  REGION 1..85: note = Description of Unknown:cds_NZ_WFIY01000004.1_cds_WP_155862945.1_804 target sequence
LQRINYEFNEEGTIASIQKGVLRDLYVVNIKCQDININLDVTSEINIFNNNEKVNVIISRSKPSFTQNDFCGHGYIVTEKEKINQ

SEQ ID NO: 42719 - protein, 84 aa, unidentified
  REGION 1..84: note = Description of Unknown:cds_NZ_WFIY01000004.1_cds_WP_155862945.1_804 target sequence
NIFNNNEKVNVIISRSKPSFTQNDFCGHGYIVTEKEKINQNRKTYVTIISLFGLLVKIESDSSFLNKYGFNIMDHVYFCVIKSK

SEQ ID NO: 42720 - protein, 85 aa, unidentified
  REGION 1..85: note = Description of Unknown:cds_NZ_WFIY01000004.1_cds_WP_155862945.1_804 target sequence
VNIKCQDININLDVTSEINIFNNNEKVNVIISRSKPSFTQNDFCGHGYIVTEKEKINQNRKTYVTIISLFGLLVKIESDSSFLNK

SEQ ID NO: 42721 - protein, 85 aa, unidentified
  REGION 1..85: note = Description of Unknown:cds_NZ_WFIY01000004.1_cds_WP_013775400.1_1013 target sequence
KYRLMDILACPMCKHFPLQLIVISQKKVERTTDEKKPLCELYCAYKNSEVKNVENPPCDECITYEIEEGVLYCPECKRWYPIIDE

SEQ ID NO: 42722 - protein, 84 aa, unidentified
  REGION 1..84: note = Description of Unknown:cds_NZ_WFIY01000004.1_cds_WP_013775400.1_1013 target sequence
YKNSEVKNVENPPCDECITYEIEEGVLYCPECKRWYPIIDEIPRMLPDKLRKKEEDLKFLEKNKDKIPSYIIENGVPFNLSSLK

SEQ ID NO: 42723 - protein, 85 aa, unidentified
  REGION 1..85: note = Description of Unknown:cds_NZ_WFIY01000004.1_cds_WP_013775400.1_1013 target sequence
VERTTDEKKPLCELYCAYKNSEVKNVENPPCDECITYEIEEGVLYCPECKRWYPIIDEIPRMLPDKLRKKEEDLKFLEKNKDKIP

SEQ ID NO: 42724 - protein, 85 aa, unidentified
  REGION 1..85: note = Description of Unknown:cds_NZ_WFIY01000004.1_cds_WP_155863112.1_1030 target sequence
SLEESLKSSVVLISPSDIEESVKKIEEEIKSHEQIDIDFQKKIQEELDKIWSTLSWLKIAESQGVWKTKTCRHAIDGVCEAWNIS

SEQ ID NO: 42725 - protein, 84 aa, unidentified
  REGION 1..84: note = Description of Unknown:cds_NZ_WFIY01000004.1_cds_WP_155863112.1_1030 target sequence
EELDKIWSTLSWLKIAESQGVWKTKTCRHAIDGVCEAWNISDPAKLGMPQEVISVNQDGTKRVVVAKFYQICITCPLYEPRRSQ

SEQ ID NO: 42726 - protein, 85 aa, unidentified
  REGION 1..85: note = Description of Unknown:cds_NZ_WFIY01000004.1_cds_WP_155863112.1_1030 target sequence
EIKSHEQIDIDFQKKIQEELDKIWSTLSWLKIAESQGVWKTKTCRHAIDGVCEAWNISDPAKLGMPQEVISVNQDGTKRVVVAKF

SEQ ID NO: 42727 - protein, 85 aa, unidentified
  REGION 1..85: note = Description of Unknown:cds_NZ_WFIY01000004.1_cds_WP_155863412.1_1394 target sequence
EEREIKYLFDSSAIFDLIKLGGKALDLLKNNYTISLAYYELGNILWKYKGKLDIETVFNALSYALSFVNIIDVKLEKEILDEAIK

SEQ ID NO: 42728 - protein, 84 aa, unidentified
  REGION 1..84: note = Description of Unknown:cds_NZ_WFIY01000004.1_cds_WP_155863412.1_1394 target sequence
LWKYKGKLDIETVFNALSYALSFVNIIDVKLEKEILDEAIKRNLTYYDSAYLVTARRIGAKLVSLDKDLINNGAITLEDLLKRN

SEQ ID NO: 42729 - protein, 85 aa, unidentified
  REGION 1..85: note = Description of Unknown:cds_NZ_WFIY01000004.1_cds_WP_155863412.1_1394 target sequence
LKNNYTISLAYYELGNILWKYKGKLDIETVFNALSYALSFVNIIDVKLEKEILDEAIKRNLTYYDSAYLVTARRIGAKLVSLDKD

SEQ ID NO: 42730 - protein, 85 aa, unidentified
  REGION 1..85: note = Description of Unknown:cds_NZ_WFIY01000004.1_cds_WP_155863691.1_1553 target sequence
PDGKIPLQAEVYLDGEKVEARVFLHVKGYKRARVTHIDVEGDKIKGLLRPRHSVYPLVEWKGNEVTFPINEHKIRMIIPEITLNF

SEQ ID NO: 42731 - protein, 84 aa, unidentified
  REGION 1..84: note = Description of Unknown:cds_NZ_WFIY01000004.1_cds_WP_155863691.1_1553 target sequence
KGLLRPRHSVYPLVEWKGNEVTFPINEHKIRMIIPEITLNFNGNLYVGGKGKGIFLGFHRNEIRQLEEIAKQKGVEPSGRGSKA

SEQ ID NO: 42732 - protein, 85 aa, unidentified
  REGION 1..85: note = Description of Unknown:cds_NZ_WFIY01000004.1_cds_WP_155863691.1_1553 target sequence
GYKRARVTHIDVEGDKIKGLLRPRHSVYPLVEWKGNEVTFPINEHKIRMIIPEITLNFNGNLYVGGKGKGIFLGFHRNEIRQLEE

SEQ ID NO: 42733 - protein, 85 aa, unidentified
  REGION 1..85: note = Description of Unknown:cds_NZ_WFIY01000004.1_cds_WP_155863777.1_1656 target sequence
IIEVFLSYYYLKIFVKTKETIKQRKVRSNESISAFKEELRALSFEPIYGESVKDIIMRFTTKIQELAEQYGYEIEFPKKAEVETD

SEQ ID NO: 42734 - protein, 84 aa, unidentified
  REGION 1..84: note = Description of Unknown:cds_NZ_WFIY01000004.1_cds_WP_155863777.1_1656 target sequence
EPIYGESVKDIIMRFTTKIQELAEQYGYEIEFPKKAEVETDGNIYYFVYNIKVKTKTSVKKLKISIQYIMYDNNQWVGLITGIK

SEQ ID NO: 42735 - protein, 85 aa, unidentified
  REGION 1..85: note = Description of Unknown:cds_NZ_WFIY01000004.1_cds_WP_155863777.1_1656 target sequence
SNESISAFKEELRALSFEPIYGESVKDIIMRFTTKIQELAEQYGYEIEFPKKAEVETDGNIYYFVYNIKVKTKTSVKKLKISIQY

SEQ ID NO: 42736 - protein, 85 aa, unidentified
  REGION 1..85: note = Description of Unknown:cds_NZ_WFIY01000004.1_cds_WP_155863838.1_1734 target sequence
SIKELITRPPVTISSSASLKDCAKLMRRENVGSLLVVDGDTPRGIITERDIIQAIADDYPLETPASKVMSTNLITADASTEVGDA

SEQ ID NO: 42737 - protein, 84 aa, unidentified
  REGION 1..84: note = Description of Unknown:cds_NZ_WFIY01000004.1_cds_WP_155863838.1_1734 target sequence
IITERDIIQAIADDYPLETPASKVMSTNLITADASTEVGDAALLMTNNKIRHLVVTEGGKIIGVISLRDVARSLGLITTDASFW

SEQ ID NO: 42738 - protein, 85 aa, unidentified
  REGION 1..85: note = Description of Unknown:cds_NZ_WFIY01000004.1_cds_WP_155863838.1_1734 target sequence
RENVGSLLVVDGDTPRGIITERDIIQAIADDYPLETPASKVMSTNLITADASTEVGDAALLMTNNKIRHLVVTEGGKIIGVISLR

SEQ ID NO: 42739 - protein, 85 aa, unidentified
  REGION 1..85: note = Description of Unknown:cds_NZ_WFIY01000004.1_cds_WP_155864009.1_1937 target sequence
VKTVGLIAFIAVLSIELIFMNALNSLNQGVSQLSNINIFSQPKMSFFAEGNKLEVCINNPENFPVIVCSINGKEISLPSSAVIPA

SEQ ID NO: 42740 - protein, 84 aa, unidentified
  REGION 1..84: note = Description of Unknown:cds_NZ_WFIY01000004.1_cds_WP_155864009.1_1937 target sequence
FFAEGNKLEVCINNPENFPVIVCSINGKEISLPSSAVIPAQTAENITLHVNNYHEFYNNIKNDNCIIFIKLHFLNVTVCTSERI

SEQ ID NO: 42741 - protein, 85 aa, unidentified
  REGION 1..85: note = Description of Unknown:cds_NZ_WFIY01000004.1_cds_WP_155864009.1_1937 target sequence
QGVSQLSNINIFSQPKMSFFAEGNKLEVCINNPENFPVIVCSINGKEISLPSSAVIPAQTAENITLHVNNYHEFYNNIKNDNCII

SEQ ID NO: 42742 - protein, 85 aa, unidentified
  REGION 1..85: note = Description of Unknown:cds_NZ_WFIY01000004.1_cds_WP_155864340.1_2353 target sequence
IFLDANFLIYLNLGVKEVENFYIKILQEDRLALDPLVIDEVIYISKKKYNVNFNDTISFLDEIVLPNSLILPIRKEDYEKAKDIM

SEQ ID NO: 42743 - protein, 84 aa, unidentified
  REGION 1..84: note = Description of Unknown:cds_NZ_WFIY01000004.1_cds_WP_155864340.1_2353 target sequence
SKKKYNVNFNDTISFLDEIVLPNSLILPIRKEDYEKAKDIMLKYDLKPSDSFHVAVMLNNSISKIISEDKDFDRVKEIQRVWLR

SEQ ID NO: 42744 - protein, 85 aa, unidentified
  REGION 1..85: note = Description of Unknown:cds_NZ_WFIY01000004.1_cds_WP_155864340.1_2353 target sequence
EDRLALDPLVIDEVIYISKKKYNVNFNDTISFLDEIVLPNSLILPIRKEDYEKAKDIMLKYDLKPSDSFHVAVMLNNSISKIISE

SEQ ID NO: 42745 - protein, 85 aa, unidentified
  REGION 1..85: note = Description of Unknown:cds_NC_003214.2_cds_NP_445675.1_10 target sequence
LNNFSYFSTIFSIALMSSNAFAGNDTLLVGFCPCIEINTLTLFLSSLYAIKPSDSCSPSYTSNLLNLFCDFVNSSTHLSISVFSS

SEQ ID NO: 42746 - protein, 84 aa, unidentified
  REGION 1..84: note = Description of Unknown:cds_NC_003214.2_cds_NP_445675.1_10 target sequence
SLYAIKPSDSCSPSYTSNLLNLFCDFVNSSTHLSISVFSSSVLSCFTSCFVIYFYPFFVFDSASYCVFNSSSREGCTSVTIGWG

SEQ ID NO: 42747 - protein, 85 aa, unidentified
  REGION 1..85: note = Description of Unknown:cds_NC_003214.2_cds_NP_445675.1_10 target sequence
LVGFCPCIEINTLTLFLSSLYAIKPSDSCSPSYTSNLLNLFCDFVNSSTHLSISVFSSSVLSCFTSCFVIYFYPFFVFDSASYCV

SEQ ID NO: 42748 - protein, 85 aa, unidentified
  REGION 1..85: note = Description of Unknown:cds_NC_029316.1_cds_YP_009230325.1_72 target sequence
DYEEVIQTIKEFFNSKNAEFNVGQPQKTENNTISIVVDFKEPIELTEEEYDDLYDFLDNLGFYPINGAENQVNNYIGYKSWVGVD

SEQ ID NO: 42749 - protein, 84 aa, unidentified
  REGION 1..84: note = Description of Unknown:cds_NC_029316.1_cds_YP_009230325.1_72 target sequence
LTEEEYDDLYDFLDNLGFYPINGAENQVNNYIGYKSWVGVDEFENDDGDEVIVYYTKVCTGGKTTFFIKKIEVELNIQENTNEL

SEQ ID NO: 42750 - protein, 85 aa, unidentified
  REGION 1..85: note = Description of Unknown:cds_NC_029316.1_cds_YP_009230325.1_72 target sequence
TENNTISIVVDFKEPIELTEEEYDDLYDFLDNLGFYPINGAENQVNNYIGYKSWVGVDEFENDDGDEVIVYYTKVCTGGKTTFFI

SEQ ID NO: 42751 - protein, 85 aa, unidentified
  REGION 1..85: note = Description of Unknown:hvTR_D0Z5U4 target sequence
IEPDLQMDGTMTEQRLLADRARRRQQDQKNKELLDLQTVHQCKKGLFCLVKQATLRYENLPGKEHQLCYTLPTQRQSFTAVVGSV

SEQ ID NO: 42752 - protein, 84 aa, unidentified
  REGION 1..84: note = Description of Unknown:hvTR_D0Z5U4 target sequence
KGLFCLVKQATLRYENLPGKEHQLCYTLPTQRQSFTAVVGSVPIKVSQQAGQQEGSICCLCTSPECLYTLIKTLCGIRKLLPMN

SEQ ID NO: 42753 - protein, 85 aa, unidentified
  REGION 1..85: note = Description of Unknown:hvTR_D0Z5U4 target sequence
QKNKELLDLQTVHQCKKGLFCLVKQATLRYENLPGKEHQLCYTLPTQRQSFTAVVGSVPIKVSQQAGQQEGSICCLCTSPECLYT

SEQ ID NO: 42754 - protein, 85 aa, unidentified
  REGION 1..85: note = Description of Unknown:vpeps_2WBT_1 target sequence
TESDVDSGSKKYLSNHKGIFIHVTLEELKRYHQLTPEQKRLIRAIVKTLIHNPQLLDESSYLYRLLASKAISQFVCPLCLMPFSS

SEQ ID NO: 42755 - protein, 85 aa, unidentified
  REGION 1..85: note = Description of Unknown:vpeps_2WBT_1 target sequence
AIVKTLIHNPQLLDESSYLYRLLASKAISQFVCPLCLMPFSSSVSLKQHIRYTEHTKVCPVCKKEFTSTDSALDHVCKKHNICVS

SEQ ID NO: 42756 - protein, 85 aa, unidentified
  REGION 1..85: note = Description of Unknown:vpeps_2WBT_1 target sequence
LKRYHQLTPEQKRLIRAIVKTLIHNPQLLDESSYLYRLLASKAISQFVCPLCLMPFSSSVSLKQHIRYTEHTKVCPVCKKEFTST

SEQ ID NO: 42757 - protein, 85 aa, unidentified
  REGION 1..85: note = Description of Unknown:cds_NC_024711.1_cds_YP_009052536.1_59 target sequence
VEIGNVKEVIKDYIIKQLVSMGESSPAIRLLIPLAKRAITNNINSFDKFLKPIADKDGMIDIEGIFDEEMEVINNIDNFNFDIPF

SEQ ID NO: 42758 - protein, 84 aa, unidentified
  REGION 1..84: note = Description of Unknown:cds_NC_024711.1_cds_YP_009052536.1_59 target sequence
NSFDKFLKPIADKDGMIDIEGIFDEEMEVINNIDNFNFDIPFIGGGNISKGIISLEVPYVNKIVALNQTDLEILKESLISLKTK

SEQ ID NO: 42759 - protein, 85 aa, unidentified
  REGION 1..85: note = Description of Unknown:cds_NC_024711.1_cds_YP_009052536.1_59 target sequence
IRLLIPLAKRAITNNINSFDKFLKPIADKDGMIDIEGIFDEEMEVINNIDNFNFDIPFIGGGNISKGIISLEVPYVNKIVALNQT

SEQ ID NO: 42760 - protein, 85 aa, unidentified
  REGION 1..85: note = Description of Unknown:cds_NZ_WFIY01000004.1_cds_WP_155862535.1_300 target sequence
EERLVLKSSEDKIVGKHVFGNLYDIDPKILTDREYLEKLVLEAVKVANMKLVEAKSWSFGGKKGGVSVLALVEESHIALHTWNEY

SEQ ID NO: 42761 - protein, 84 aa, unidentified
  REGION 1..84: note = Description of Unknown:cds_NZ_WFIY01000004.1_cds_WP_155862535.1_300 target sequence
VKVANMKLVEAKSWSFGGKKGGVSVLALVEESHIALHTWNEYNYATLDVYTCGEQSDPQAAFDYIVKALKPRRYQVFYADRSSD

SEQ ID NO: 42762 - protein, 85 aa, unidentified
  REGION 1..85: note = Description of Unknown:cds_NZ_WFIY01000004.1_cds_WP_155862535.1_300 target sequence
KILTDREYLEKLVLEAVKVANMKLVEAKSWSFGGKKGGVSVLALVEESHIALHTWNEYNYATLDVYTCGEQSDPQAAFDYIVKAL

SEQ ID NO: 42763 - protein, 85 aa, unidentified
  REGION 1..85: note = Description of Unknown:cds_NZ_WFIY01000004.1_cds_WP_155862663.1_456 target sequence
SQINKEEWKQKIMEALTQVFDPEIPVDIVNLGLIYDLQISDEGDVYIKLGLTAPGCPVVDDLVYTVEQVIKETVPAKKVDVDIDL

SEQ ID NO: 42764 - protein, 84 aa, unidentified
  REGION 1..84: note = Description of Unknown:cds_NZ_WFIY01000004.1_cds_WP_155862663.1_456 target sequence
DVYIKLGLTAPGCPVVDDLVYTVEQVIKETVPAKKVDVDIDLETPWSPLRMTPEGREKFKKLYGYDIVEMWVQTYGLPTQEQKS

SEQ ID NO: 42765 - protein, 85 aa, unidentified
  REGION 1..85: note = Description of Unknown:cds_NZ_WFIY01000004.1_cds_WP_155862663.1_456 target sequence
IVNLGLIYDLQISDEGDVYIKLGLTAPGCPVVDDLVYTVEQVIKETVPAKKVDVDIDLETPWSPLRMTPEGREKFKKLYGYDIVE

SEQ ID NO: 42766 - protein, 85 aa, unidentified
  REGION 1..85: note = Description of Unknown:cds_NZ_WFIY01000004.1_cds_WP_155862872.1_711 target sequence
GVYQGNDLRKITGGLKGRHRDKRKFEMGELPTETKLHTEDIREKVRVMGGNFKIKLKYAAFANVYNPSDHTYKKVKILEVEEVPS

SEQ ID NO: 42767 - protein, 84 aa, unidentified
  REGION 1..84: note = Description of Unknown:cds_NZ_WFIY01000004.1_cds_WP_155862872.1_711 target sequence
KVRVMGGNFKIKLKYAAFANVYNPSDHTYKKVKILEVEEVPSNREYARRGIIVKGARIRTEIGEAIVTSRPGQDGVINAILVQK

SEQ ID NO: 42768 - protein, 85 aa, unidentified
  REGION 1..85: note = Description of Unknown:cds_NZ_WFIY01000004.1_cds_WP_155862872.1_711 target sequence
GELPTETKLHTEDIREKVRVMGGNFKIKLKYAAFANVYNPSDHTYKKVKILEVEEVPSNREYARRGIIVKGARIRTEIGEAIVTS

SEQ ID NO: 42769 - protein, 85 aa, unidentified
  REGION 1..85: note = Description of Unknown:cds_NZ_WFIY01000004.1_cds_769 target sequence
VAEKIPPEVQTQLIKLQQLQKQLDNLTYERSVIDSELREINKILEELSKLSADTPVYKIVGNILVRKDKASIEQELNDRKEILEL

SEQ ID NO: 42770 - protein, 84 aa, unidentified
  REGION 1..84: note = Description of Unknown:cds_NZ_WFIY01000004.1_cds_769 target sequence
EELSKLSADTPVYKIVGNILVRKDKASIEQELNDRKEILELRSRTYLKQESLLRKQFEDLQKNVNDLLQRYYPQLKGSSNPPKA

SEQ ID NO: 42771 - protein, 85 aa, unidentified
  REGION 1..85: note = Description of Unknown:cds_NZ_WFIY01000004.1_cds_769 target sequence
YERSVIDSELREINKILEELSKLSADTPVYKIVGNILVRKDKASIEQELNDRKEILELRSRTYLKQESLLRKQFEDLQKNVNDLL

SEQ ID NO: 42772 - protein, 85 aa, unidentified
  REGION 1..85: note = Description of Unknown:cds_NZ_WFIY01000004.1_cds_WP_155862948.1_807 target sequence
TETEVEELLTKIMSNKISDKDLQALQAIYGSDKHFWNKISVIVDLKLRSKKAKISNKFDNVIYLQDSSEKVIGIVVIYNENEPLK

SEQ ID NO: 42773 - protein, 84 aa, unidentified
  REGION 1..84: note = Description of Unknown:cds_NZ_WFIY01000004.1_cds_WP_155862948.1_807 target sequence
DLKLRSKKAKISNKFDNVIYLQDSSEKVIGIVVIYNENEPLKINEIFKYIEMAKSSNIDAYLAIIDKYGDITYYNLSEVSLSKG

SEQ ID NO: 42774 - protein, 85 aa, unidentified
  REGION 1..85: note = Description of Unknown:cds_NZ_WFIY01000004.1_cds_WP_155862948.1_807 target sequence
IYGSDKHFWNKISVIVDLKLRSKKAKISNKFDNVIYLQDSSEKVIGIVVIYNENEPLKINEIFKYIEMAKSSNIDAYLAIIDKYG

SEQ ID NO: 42775 - protein, 85 aa, unidentified
  REGION 1..85: note = Description of Unknown:cds_NZ_WFIY01000004.1_cds_WP_155863265.1_1219 target sequence
NLNILFKDYIIYNIIAGIIFSILYMLVDGFAKYYNLIYGILIIGIAAWSLGRYTLNKIEDDKIRSGVQAAWLLVSFALGYVSIIY

SEQ ID NO: 42776 - protein, 84 aa, unidentified
  REGION 1..84: note = Description of Unknown:cds_NZ_WFIY01000004.1_cds_WP_155863265.1_1219 target sequence
GIAAWSLGRYTLNKIEDDKIRSGVQAAWLLVSFALGYVSIIYAPVLSSSIQITVVETILSLVQIVWGAILLGMSYKNGYSIIKV

SEQ ID NO: 42777 - protein, 85 aa, unidentified
  REGION 1..85: note = Description of Unknown:cds_NZ_WFIY01000004.1_cds_WP_155863265.1_1219 target sequence
DGFAKYYNLIYGILIIGIAAWSLGRYTLNKIEDDKIRSGVQAAWLLVSFALGYVSIIYAPVLSSSIQITVVETILSLVQIVWGAI

SEQ ID NO: 42778 - protein, 85 aa, unidentified
  REGION 1..85: note = Description of Unknown:cds_NZ_WFIY01000004.1_cds_WP_155864416.1_1280 target sequence
IDSNVFIYVLFSDPLYGERAKELLRTAEGGEVYSSTLVISQVLAHLERRKKVEAIPIFIDYLKQSGIKIIETTWEDFINAIRTLQ

SEQ ID NO: 42779 - protein, 84 aa, unidentified
  REGION 1..84: note = Description of Unknown:cds_NZ_WFIY01000004.1_cds_WP_155864416.1_1280 target sequence
AHLERRKKVEAIPIFIDYLKQSGIKIIETTWEDFINAIRTLQSSKLSYKLWDDTIIFSQMKRLGIDVIYSNDKDFDLFPIKREF

SEQ ID NO: 42780 - protein, 85 aa, unidentified
  REGION 1..85: note = Description of Unknown:cds_NZ_WFIY01000004.1_cds_WP_155864416.1_1280 target sequence
EGGEVYSSTLVISQVLAHLERRKKVEAIPIFIDYLKQSGIKIIETTWEDFINAIRTLQSSKLSYKLWDDTIIFSQMKRLGIDVIY

SEQ ID NO: 42781 - protein, 85 aa, unidentified
  REGION 1..85: note = Description of Unknown:cds_NZ_WFIY01000004.1_cds_WP_155863388.1_1363 target sequence
SDEYLNQIITKLKEDKVIDSIVEYLYILKMVRDIWLNDEVIKDLGSLLNSILALVPIIEKLSEFLSDPEVVKIINTIASEDTIKI

SEQ ID NO: 42782 - protein, 84 aa, unidentified
  REGION 1..84: note = Description of Unknown:cds_NZ_WFIY01000004.1_cds_WP_155863388.1_1363 target sequence
LGSLLNSILALVPIIEKLSEFLSDPEVVKIINTIASEDTIKIIQNPEKMSLTKLLSEMRNENFQRGLGLLVKIIEKIGEATEGK

SEQ ID NO: 42783 - protein, 85 aa, unidentified
  REGION 1..85: note = Description of Unknown:cds_NZ_WFIY01000004.1_cds_WP_155863388.1_1363 target sequence
LKMVRDIWLNDEVIKDLGSLLNSILALVPIIEKLSEFLSDPEVVKIINTIASEDTIKIIQNPEKMSLTKLLSEMRNENFQRGLGL

SEQ ID NO: 42784 - protein, 85 aa, unidentified
  REGION 1..85: note = Description of Unknown:cds_NZ_WFIY01000004.1_cds_WP_155864169.1_2124 target sequence
VEHSPALTAFIILIGIVASTFAVVYVTYSLVSSLFTQQCTITLYSGCVFNNDTIKVKLFSPKQLTVSYVKINGEVFYPENKVIIY

SEQ ID NO: 42785 - protein, 84 aa, unidentified
  REGION 1..84: note = Description of Unknown:cds_NZ_WFIY01000004.1_cds_WP_155864169.1_2124 target sequence
SGCVFNNDTIKVKLFSPKQLTVSYVKINGEVFYPENKVIIYPGTNTYYITTGDQNLSPQSKVMVEIFFNNGEEISFNTTVLTSS

SEQ ID NO: 42786 - protein, 85 aa, unidentified
  REGION 1..85: note = Description of Unknown:cds_NZ_WFIY01000004.1_cds_WP_155864169.1_2124 target sequence
YSLVSSLFTQQCTITLYSGCVFNNDTIKVKLFSPKQLTVSYVKINGEVFYPENKVIIYPGTNTYYITTGDQNLSPQSKVMVEIFF

SEQ ID NO: 42787 - protein, 85 aa, unidentified
  REGION 1..85: note = Description of Unknown:cds_NC_035460.1_cds_YP_009407975.1_24 target sequence
SSNFLTALKVIFTEDYRQKMYRSLCYYTAVLNYTLANKTLTFTTDDIKKTINETTKCEIVDQELEDFMYFCQRYIICLNVLTPSN

SEQ ID NO: 42788 - protein, 84 aa, unidentified
  REGION 1..84: note = Description of Unknown:cds_NC_035460.1_cds_YP_009407975.1_24 target sequence
TDDIKKTINETTKCEIVDQELEDFMYFCQRYIICLNVLTPSNIDEISTQINELNSCIKQNDTDFLQCEDMEIDFTECVETTTDE

SEQ ID NO: 42789 - protein, 85 aa, unidentified
  REGION 1..85: note = Description of Unknown:cds_NC_035460.1_cds_YP_009407975.1_24 target sequence
TAVLNYTLANKTLTFTTDDIKKTINETTKCEIVDQELEDFMYFCQRYIICLNVLTPSNIDEISTQINELNSCIKQNDTDFLQCED

SEQ ID NO: 42790 - protein, 85 aa, unidentified
  REGION 1..85: note = Description of Unknown:cds_NC_035460.1_cds_YP_009408093.1_142 target sequence
DTKLFRETKDVLLSYIKYKHCSLIDCNKVTELNISNNLLNDQIINKINECKYSKNIYNSIIEIINNFSEWNVCIIILHITDILSL

SEQ ID NO: 42791 - protein, 84 aa, unidentified
  REGION 1..84: note = Description of Unknown:cds_NC_035460.1_cds_YP_009408093.1_142 target sequence
INKINECKYSKNIYNSIIEIINNFSEWNVCIIILHITDILSLYYLHTKNNINDLITLISAALMEKNYNWMINNNGWDGFINFLK

SEQ ID NO: 42792 - protein, 85 aa, unidentified
  REGION 1..85: note = Description of Unknown:cds_NC_035460.1_cds_YP_009408093.1_142 target sequence
KVTELNISNNLLNDQIINKINECKYSKNIYNSIIEIINNFSEWNVCIIILHITDILSLYYLHTKNNINDLITLISAALMEKNYNW

SEQ ID NO: 42793 - protein, 85 aa, unidentified
  REGION 1..85: note = Description of Unknown:cds_NC_029316.1_cds_YP_009230262.1_9 target sequence
SHISQLKIDLKNVNKKALMKGLQLLGIETIESNVAVDYYGRQQQVNDALLAFKLGKYQFVLTKQGQIVGDFWEYKEDFIQNTIKT

SEQ ID NO: 42794 - protein, 84 aa, unidentified
  REGION 1..84: note = Description of Unknown:cds_NC_029316.1_cds_YP_009230262.1_9 target sequence
QVNDALLAFKLGKYQFVLTKQGQIVGDFWEYKEDFIQNTIKTAMMVASIPGVKKVNAKMERSGWEVELDVDETLYNQQQQALGW

SEQ ID NO: 42795 - protein, 85 aa, unidentified
  REGION 1..85: note = Description of Unknown:cds_NC_029316.1_cds_YP_009230262.1_9 target sequence
ETIESNVAVDYYGRQQQVNDALLAFKLGKYQFVLTKQGQIVGDFWEYKEDFIQNTIKTAMMVASIPGVKKVNAKMERSGWEVELD

SEQ ID NO: 42796 - protein, 85 aa, unidentified
  REGION 1..85: note = Description of Unknown:cds_NC_030656.1_cds_YP_009268798.1_83 target sequence
SIETKINDFIVIDRGEDGLPNIIYIYDSIARFENYSIYKIAKYVFRNNITALAAIFPNSEFLDSIPFLIPKKTFHIRDSKTNELE

SEQ ID NO: 42797 - protein, 84 aa, unidentified
  REGION 1..84: note = Description of Unknown:cds_NC_030656.1_cds_YP_009268798.1_83 target sequence
VFRNNITALAAIFPNSEFLDSIPFLIPKKTFHIRDSKTNELETLSPEYIKRVLINLFNSFRTFDDSLNISYYLPLRKNIHNVIS

SEQ ID NO: 42798 - protein, 85 aa, unidentified
  REGION 1..85: note = Description of Unknown:cds_NC_030656.1_cds_YP_009268798.1_83 target sequence
SIARFENYSIYKIAKYVFRNNITALAAIFPNSEFLDSIPFLIPKKTFHIRDSKTNELETLSPEYIKRVLINLFNSFRTFDDSLNI

SEQ ID NO: 42799 - protein, 85 aa, unidentified
  REGION 1..85: note = Description of Unknown:cds_NC_038931.1_cds_YP_009509118.1_2 target sequence
TRYNYIRNLRIIRGEEIKVGVSSDRIPMIEIEPGHNDPERMCVMFTAMEYSHIPYQADNLDEVYDSCKILTSKITTYINVAIGFG

SEQ ID NO: 42800 - protein, 84 aa, unidentified
  REGION 1..84: note = Description of Unknown:cds_NC_038931.1_cds_YP_009509118.1_2 target sequence
VMFTAMEYSHIPYQADNLDEVYDSCKILTSKITTYINVAIGFGKNLGLKLSEMMLVTRDKSKREFKVGLELGIKYAYNWTCKFQ

SEQ ID NO: 42801 - protein, 85 aa, unidentified
  REGION 1..85: note = Description of Unknown:cds_NC_038931.1_cds_YP_009509118.1_2 target sequence
MIEIEPGHNDPERMCVMFTAMEYSHIPYQADNLDEVYDSCKILTSKITTYINVAIGFGKNLGLKLSEMMLVTRDKSKREFKVGLE

SEQ ID NO: 42802 - protein, 85 aa, unidentified
  REGION 1..85: note = Description of Unknown:cds_NC_024711.1_cds_YP_009442999.1_25 target sequence
EILDYNVIKNNSFDRTKSYFSCYYKSIILFTDYDAKSYNFAVRYNDITKSNELYVILYNDNRINNSVPIIRDANTGFKLYIPNIV

SEQ ID NO: 42803 - protein, 84 aa, unidentified
  REGION 1..84: note = Description of Unknown:cds_NC_024711.1_cds_YP_009442999.1_25 target sequence
RYNDITKSNELYVILYNDNRINNSVPIIRDANTGFKLYIPNIVIRLLDTRLRNAFVVSKDDFNINVKFVEERNGFCIIYHIDIE

SEQ ID NO: 42804 - protein, 85 aa, unidentified
  REGION 1..85: note = Description of Unknown:cds_NC_024711.1_cds_YP_009442999.1_25 target sequence
ILFTDYDAKSYNFAVRYNDITKSNELYVILYNDNRINNSVPIIRDANTGFKLYIPNIVIRLLDTRLRNAFVVSKDDFNINVKFVE

SEQ ID NO: 42805 - protein, 85 aa, unidentified
  REGION 1..85: note = Description of Unknown:cds_NC_024711.1_cds_YP_009052507.1_27 target sequence
KLHPIFGINALARVCICCGKVIGYTPLGNSVEEDASKSKQIAEAIVCKECIDKLDSETCFIACDMDKDNYITATYDTLWIRNKGL

SEQ ID NO: 42806 - protein, 84 aa, unidentified
  REGION 1..84: note = Description of Unknown:cds_NC_024711.1_cds_YP_009052507.1_27 target sequence
EAIVCKECIDKLDSETCFIACDMDKDNYITATYDTLWIRNKGLKEFFKELDSIQPINIIPKEHFYSIFGNVVKDFYNNQEDENN

SEQ ID NO: 42807 - protein, 85 aa, unidentified
  REGION 1..85: note = Description of Unknown:cds_NC_024711.1_cds_YP_009052507.1_27 target sequence
GNSVEEDASKSKQIAEAIVCKECIDKLDSETCFIACDMDKDNYITATYDTLWIRNKGLKEFFKELDSIQPINIIPKEHFYSIFGN

SEQ ID NO: 42808 - protein, 85 aa, unidentified
  REGION 1..85: note = Description of Unknown:cds_NZ_WFIY01000004.1_cds_WP_155862363.1_94 target sequence
IKKILSGFIGGLLEIIFFINNLSVFSTISYHVLRIDSVIVGILLHLIAAIIIALVGISIIEVTKVRYENRNFLSTLIMGILFGSA

SEQ ID NO: 42809 - protein, 84 aa, unidentified
  REGION 1..84: note = Description of Unknown:cds_NZ_WFIY01000004.1_cds_WP_155862363.1_94 target sequence
LLHLIAAIIIALVGISIIEVTKVRYENRNFLSTLIMGILFGSAVLSLFSLPVHLLVFPIKITLTYVLAHIFYGIITYLVYSFFK

SEQ ID NO: 42810 - protein, 85 aa, unidentified
  REGION 1..85: note = Description of Unknown:cds_NZ_WFIY01000004.1_cds_WP_155862363.1_94 target sequence
ISYHVLRIDSVIVGILLHLIAAIIIALVGISIIEVTKVRYENRNFLSTLIMGILFGSAVLSLFSLPVHLLVFPIKITLTYVLAHI

SEQ ID NO: 42811 - protein, 85 aa, unidentified
  REGION 1..85: note = Description of Unknown:cds_NZ_WFIY01000004.1_cds_WP_152940319.1_666 target sequence
AERIKFPDGREVDIHEVMAFLYGLSKSDVEVLHVIMSKKGKISTDELAETLKVTKASISKSINNLIYKGLIMRDKIEEDKKKGRP

SEQ ID NO: 42812 - protein, 84 aa, unidentified
  REGION 1..84: note = Description of Unknown:cds_NZ_WFIY01000004.1_cds_WP_152940319.1_666 target sequence
STDELAETLKVTKASISKSINNLIYKGLIMRDKIEEDKKKGRPGYVYWVDNEYLYKKIAEDLEALVSKVKENLKEHLPVMAEAQ

SEQ ID NO: 42813 - protein, 85 aa, unidentified
  REGION 1..85: note = Description of Unknown:cds_NZ_WFIY01000004.1_cds_WP_152940319.1_666 target sequence
DVEVLHVIMSKKGKISTDELAETLKVTKASISKSINNLIYKGLIMRDKIEEDKKKGRPGYVYWVDNEYLYKKIAEDLEALVSKVK

SEQ ID NO: 42814 - protein, 85 aa, unidentified
  REGION 1..85: note = Description of Unknown:cds_NZ_WFIY01000004.1_cds_WP_155862850.1_684 target sequence
RTVKDYMNTPVFQVEANTSLQEVCKLMLERGIGSVLVTENGVPKGIFTDRDAVKAIASGFSPSDEVRVAATMGNLIVVDLNTDIV

SEQ ID NO: 42815 - protein, 84 aa, unidentified
  REGION 1..84: note = Description of Unknown:cds_NZ_WFIY01000004.1_cds_WP_155862850.1_684 target sequence
PKGIFTDRDAVKAIASGFSPSDEVRVAATMGNLIVVDLNTDIVDAVSIMTKNKIRHLPVKDSEGNIVGILSIVDVSKAIQDLYK

SEQ ID NO: 42816 - protein, 85 aa, unidentified
  REGION 1..85: note = Description of Unknown:cds_NZ_WFIY01000004.1_cds_WP_155862850.1_684 target sequence
LERGIGSVLVTENGVPKGIFTDRDAVKAIASGFSPSDEVRVAATMGNLIVVDLNTDIVDAVSIMTKNKIRHLPVKDSEGNIVGIL

SEQ ID NO: 42817 - protein, 85 aa, unidentified
  REGION 1..85: note = Description of Unknown:cds_NZ_WFIY01000004.1_cds_WP_152941379.1_745 target sequence
LANALVTIYNNEVRRNKQAIIMPSSKLIINVLRVMQKEGYIGEFEYIDDGRWGKVVVQLLGRINKCGPITPRYSLKYRDMINLPQ

SEQ ID NO: 42818 - protein, 84 aa, unidentified
  REGION 1..84: note = Description of Unknown:cds_NZ_WFIY01000004.1_cds_WP_152941379.1_745 target sequence
FEYIDDGRWGKVVVQLLGRINKCGPITPRYSLKYRDMINLPQHIRTYLPSKEIGVILVSTSKGVMTHKEAARQRLGGVALGYVY

SEQ ID NO: 42819 - protein, 85 aa, unidentified
  REGION 1..85: note = Description of Unknown:cds_NZ_WFIY01000004.1_cds_WP_152941379.1_745 target sequence
IINVLRVMQKEGYIGEFEYIDDGRWGKVVVQLLGRINKCGPITPRYSLKYRDMINLPQHIRTYLPSKEIGVILVSTSKGVMTHKE

SEQ ID NO: 42820 - protein, 85 aa, unidentified
  REGION 1..85: note = Description of Unknown:cds_NZ_WFIY01000004.1_cds_WP_155863013.1_893 target sequence
IGIILVLHGSRVEEWKNIADGYKNLLSEYFPLVEYGFLEFNKPTLRESLEILVNKGATEIIAVPLLFAAGMHFYRDIPKLLGLDE

SEQ ID NO: 42821 - protein, 84 aa, unidentified
  REGION 1..84: note = Description of Unknown:cds_NZ_WFIY01000004.1_cds_WP_155863013.1_893 target sequence
PTLRESLEILVNKGATEIIAVPLLFAAGMHFYRDIPKLLGLDEKGETVINEKKVKVVIAKPIGVDKRVAEILKERVEEKIDGKS

SEQ ID NO: 42822 - protein, 85 aa, unidentified
  REGION 1..85: note = Description of Unknown:cds_NZ_WFIY01000004.1_cds_WP_155863013.1_893 target sequence
EYFPLVEYGFLEFNKPTLRESLEILVNKGATEIIAVPLLFAAGMHFYRDIPKLLGLDEKGETVINEKKVKVVIAKPIGVDKRVAE

SEQ ID NO: 42823 - protein, 85 aa, unidentified
  REGION 1..85: note = Description of Unknown:cds_NZ_WFIY01000004.1_cds_WP_013775363.1_1049 target sequence
EQSQISGSRIKLPSGKDAGLVDILSFCYGLSETDVQVLMALMKGDARGTEELESDLKLSKASINRSLNKLLEMALVMRIKEPGNK

SEQ ID NO: 42824 - protein, 84 aa, unidentified
  REGION 1..84: note = Description of Unknown:cds_NZ_WFIY01000004.1_cds_WP_013775363.1_1049 target sequence
KGDARGTEELESDLKLSKASINRSLNKLLEMALVMRIKEPGNKAGRPRYLYKAKDYNELKSKILQDIKDCSDKMASLVESEFKP

SEQ ID NO: 42825 - protein, 85 aa, unidentified
  REGION 1..85: note = Description of Unknown:cds_NZ_WFIY01000004.1_cds_WP_013775363.1_1049 target sequence
YGLSETDVQVLMALMKGDARGTEELESDLKLSKASINRSLNKLLEMALVMRIKEPGNKAGRPRYLYKAKDYNELKSKILQDIKDC

SEQ ID NO: 42826 - protein, 85 aa, unidentified
  REGION 1..85: note = Description of Unknown:cds_NZ_WFIY01000004.1_cds_WP_155863390.1_1365 target sequence
ALKAKLKHKNVLTVSGEEIVKNIKSQIAKYRVIVVTEGNKIIGYLTNDEIENANENERLKDIIKKEKSVLTITGKEDPLEILNLM

SEQ ID NO: 42827 - protein, 84 aa, unidentified
  REGION 1..84: note = Description of Unknown:cds_NZ_WFIY01000004.1_cds_WP_155863390.1_1365 target sequence
GYLTNDEIENANENERLKDIIKKEKSVLTITGKEDPLEILNLMVRSRIDYLIIVDEKGRVKGALSIDDALENVKRMIKNTINSC

SEQ ID NO: 42828 - protein, 85 aa, unidentified
  REGION 1..85: note = Description of Unknown:cds_NZ_WFIY01000004.1_cds_WP_155863390.1_1365 target sequence
AKYRVIVVTEGNKIIGYLTNDEIENANENERLKDIIKKEKSVLTITGKEDPLEILNLMVRSRIDYLIIVDEKGRVKGALSIDDAL

SEQ ID NO: 42829 - protein, 85 aa, unidentified
  REGION 1..85: note = Description of Unknown:cds_NZ_WFIY01000004.1_cds_WP_155863864.1_1767 target sequence
EFIINLYGNSENPLVEINGKKYTADRLYKEGPLYAFLLSIPHCIITMFEHLAKKEGIQVKVCKVRSTYYLDDSLLLLGKYVIKNI

SEQ ID NO: 42830 - protein, 84 aa, unidentified
  REGION 1..84: note = Description of Unknown:cds_NZ_WFIY01000004.1_cds_WP_155863864.1_1767 target sequence
CIITMFEHLAKKEGIQVKVCKVRSTYYLDDSLLLLGKYVIKNIKIEIYGDCSKEELNELVEKVKQNCPIYLSLSDRIQLLPLID

SEQ ID NO: 42831 - protein, 85 aa, unidentified
  REGION 1..85: note = Description of Unknown:cds_NZ_WFIY01000004.1_cds_WP_155863864.1_1767 target sequence
YKEGPLYAFLLSIPHCIITMFEHLAKKEGIQVKVCKVRSTYYLDDSLLLLGKYVIKNIKIEIYGDCSKEELNELVEKVKQNCPIY

SEQ ID NO: 42832 - protein, 85 aa, unidentified
  REGION 1..85: note = Description of Unknown:cds_NZ_WFIY01000004.1_cds_WP_013776491.1_2234 target sequence
SQEQEQKKKILIVVTHGPEDLDRTYAPLFMASIAASMEYETSVFFMIKGPLLLSKAWQEEERKKGNNPFIHFFDMARDNGVKMYV

SEQ ID NO: 42833 - protein, 84 aa, unidentified
  REGION 1..84: note = Description of Unknown:cds_NZ_WFIY01000004.1_cds_WP_013776491.1_2234 target sequence
VFFMIKGPLLLSKAWQEEERKKGNNPFIHFFDMARDNGVKMYVCIQSLKDMCHMNESDVVDGVELVGGSTLIDLTMDADRTLFF

SEQ ID NO: 42834 - protein, 85 aa, unidentified
  REGION 1..85: note = Description of Unknown:cds_NZ_WFIY01000004.1_cds_WP_013776491.1_2234 target sequence
LFMASIAASMEYETSVFFMIKGPLLLSKAWQEEERKKGNNPFIHFFDMARDNGVKMYVCIQSLKDMCHMNESDVVDGVELVGGST

SEQ ID NO: 42835 - protein, 85 aa, unidentified
  REGION 1..85: note = Description of Unknown:cds_NC_007409.1_cds_YP_319846.1_15 target sequence
KVKFKQFKNGVRVYNLGDKYIVVYKGDVWGIGSTEDEAMADASRVYRDSKGLMLEPSPFDIYEGGTENEEDVEPLMDYKEVAVYY

SEQ ID NO: 42836 - protein, 84 aa, unidentified
  REGION 1..84: note = Description of Unknown:cds_NC_007409.1_cds_YP_319846.1_15 target sequence
SRVYRDSKGLMLEPSPFDIYEGGTENEEDVEPLMDYKEVAVYYFPPYYLVYDKEKDKVLGSGMDLDDALAEATREKPGLVELFW

SEQ ID NO: 42837 - protein, 85 aa, unidentified
  REGION 1..85: note = Description of Unknown:cds_NC_007409.1_cds_YP_319846.1_15 target sequence
VWGIGSTEDEAMADASRVYRDSKGLMLEPSPFDIYEGGTENEEDVEPLMDYKEVAVYYFPPYYLVYDKEKDKVLGSGMDLDDALA

SEQ ID NO: 42838 - protein, 85 aa, unidentified
  REGION 1..85: note = Description of Unknown:vpeps_2X5R_1 target sequence
GAMARVGPKIEITHGGKKYTVFSKVTHLVPRTENGEEAEYVVFGPEKEGVISVVVLAPKDLNEEALALRVKWFNDTKPRCVKCGA

SEQ ID NO: 42839 - protein, 85 aa, unidentified
  REGION 1..85: note = Description of Unknown:vpeps_2X5R_1 target sequence
FGPEKEGVISVVVLAPKDLNEEALALRVKWFNDTKPRCVKCGAAYNGKNHFRVVAIRNGTYYLDAVCDKCEPRITWLSAIVIGRS

SEQ ID NO: 42840 - protein, 85 aa, unidentified
  REGION 1..85: note = Description of Unknown:vpeps_2X5R_1 target sequence
LVPRTENGEEAEYVVFGPEKEGVISVVVLAPKDLNEEALALRVKWFNDTKPRCVKCGAAYNGKNHFRVVAIRNGTYYLDAVCDKC

SEQ ID NO: 42841 - protein, 85 aa, unidentified
  REGION 1..85: note = Description of Unknown:cds_NZ_WFIY01000004.1_cds_WP_155862355.1_86 target sequence
SQIPPKGFSFSQKLVKEIKMNDGWKYSLLEIKVKEPHYLHIMDNGEFSTGVTVDDKGNVIRIYATRIKVLNETDDTKEEEIEQTV

SEQ ID NO: 42842 - protein, 84 aa, unidentified
  REGION 1..84: note = Description of Unknown:cds_NZ_WFIY01000004.1_cds_WP_155862355.1_86 target sequence
MDNGEFSTGVTVDDKGNVIRIYATRIKVLNETDDTKEEEIEQTVVELKSKKIIHTRSKVSLNKKEQGFVGIKSMEIVNQEEYEL

SEQ ID NO: 42843 - protein, 85 aa, unidentified
  REGION 1..85: note = Description of Unknown:cds_NZ_WFIY01000004.1_cds_WP_155862355.1_86 target sequence
LLEIKVKEPHYLHIMDNGEFSTGVTVDDKGNVIRIYATRIKVLNETDDTKEEEIEQTVVELKSKKIIHTRSKVSLNKKEQGFVGI

SEQ ID NO: 42844 - protein, 85 aa, unidentified
  REGION 1..85: note = Description of Unknown:cds_NZ_WFIY01000004.1_cds_WP_155862469.1_224 target sequence
LQKRDICPFYKNGYCISPMLDSPSDIVVSANRCFKTYKTCRYYVDQGEEKQGLENFQQYEKIDQDIKFYPKISLIQEKIDSGCEF

SEQ ID NO: 42845 - protein, 84 aa, unidentified
  REGION 1..84: note = Description of Unknown:cds_NZ_WFIY01000004.1_cds_WP_155862469.1_224 target sequence
YVDQGEEKQGLENFQQYEKIDQDIKFYPKISLIQEKIDSGCEFFQLMKTENGFIASCKILNRIITESQAQLCSKYWQTCPLRRI

SEQ ID NO: 42846 - protein, 85 aa, unidentified
  REGION 1..85: note = Description of Unknown:cds_NZ_WFIY01000004.1_cds_WP_155862469.1_224 target sequence
VSANRCFKTYKTCRYYVDQGEEKQGLENFQQYEKIDQDIKFYPKISLIQEKIDSGCEFFQLMKTENGFIASCKILNRIITESQAQ

SEQ ID NO: 42847 - protein, 85 aa, unidentified
  REGION 1..85: note = Description of Unknown:cds_NZ_WFIY01000004.1_cds_WP_155862498.1_257 target sequence
VQLYVENSKSKSGKHAIRTLLYKVVDGKLIEVKDEGNKVSPTYKVGEAKVINISDNGTYIYVKLVKNIYNKIIGEILVIDNNSIV

SEQ ID NO: 42848 - protein, 84 aa, unidentified
  REGION 1..84: note = Description of Unknown:cds_NZ_WFIY01000004.1_cds_WP_155862498.1_257 target sequence
TYKVGEAKVINISDNGTYIYVKLVKNIYNKIIGEILVIDNNSIVLKLKYRKLKIKKIEGDEKYFDKVKELFEKLKIPIKRANLK

SEQ ID NO: 42849 - protein, 85 aa, unidentified
  REGION 1..85: note = Description of Unknown:cds_NZ_WFIY01000004.1_cds_WP_155862498.1_257 target sequence
KLIEVKDEGNKVSPTYKVGEAKVINISDNGTYIYVKLVKNIYNKIIGEILVIDNNSIVLKLKYRKLKIKKIEGDEKYFDKVKELF

SEQ ID NO: 42850 - protein, 85 aa, unidentified
  REGION 1..85: note = Description of Unknown:cds_NZ_WFIY01000004.1_cds_WP_155862825.1_654 target sequence
NGTTVKQSMLQWAGMLLSTLWAGVHLDLVDAKLPNPTATLIYRVFFGFVASLAIVAAVALIQGIKKLYLPITIFYVIDFALLLET

SEQ ID NO: 42851 - protein, 84 aa, unidentified
  REGION 1..84: note = Description of Unknown:cds_NZ_WFIY01000004.1_cds_WP_155862825.1_654 target sequence
YRVFFGFVASLAIVAAVALIQGIKKLYLPITIFYVIDFALLLETRTAPALFVGKVLPFNPYVDISLIIDAIMIVLSLALWKISK

SEQ ID NO: 42852 - protein, 85 aa, unidentified
  REGION 1..85: note = Description of Unknown:cds_NZ_WFIY01000004.1_cds_WP_155862825.1_654 target sequence
LVDAKLPNPTATLIYRVFFGFVASLAIVAAVALIQGIKKLYLPITIFYVIDFALLLETRTAPALFVGKVLPFNPYVDISLIIDAI

SEQ ID NO: 42853 - protein, 85 aa, unidentified
  REGION 1..85: note = Description of Unknown:cds_NZ_WFIY01000004.1_cds_WP_155864398.1_1012 target sequence
QKSLLATIKDMEKNENDKDMDRLDLILASRVAFQHMMRTIKAFDQWLQDPMIIKHMPKEMLEDVKRTSWSILEQLLELDIRHTSE

SEQ ID NO: 42854 - protein, 84 aa, unidentified
  REGION 1..84: note = Description of Unknown:cds_NZ_WFIY01000004.1_cds_WP_155864398.1_1012 target sequence
AFDQWLQDPMIIKHMPKEMLEDVKRTSWSILEQLLELDIRHTSEARDLISKLGKEGKLDPLIWSRPLFDEQQNQNNRRITFTTM

SEQ ID NO: 42855 - protein, 85 aa, unidentified
  REGION 1..85: note = Description of Unknown:cds_NZ_WFIY01000004.1_cds_WP_155864398.1_1012 target sequence
ASRVAFQHMMRTIKAFDQWLQDPMIIKHMPKEMLEDVKRTSWSILEQLLELDIRHTSEARDLISKLGKEGKLDPLIWSRPLFDEQ

SEQ ID NO: 42856 - protein, 85 aa, unidentified
  REGION 1..85: note = Description of Unknown:cds_NZ_WFIY01000004.1_cds_WP_155863145.1_1069 target sequence
LNMRPLVAIDLNSNIDYLVLFKFINNLLRKFKDVDITFIVDDGKILEFDNNEVFKISDSYSTVELVRDLKSISDKGDSLRLESLL

SEQ ID NO: 42857 - protein, 84 aa, unidentified
  REGION 1..84: note = Description of Unknown:cds_NZ_WFIY01000004.1_cds_WP_155863145.1_1069 target sequence
DGKILEFDNNEVFKISDSYSTVELVRDLKSISDKGDSLRLESLLKLKRELGRSIVILVSDRKVKSKGELIFVFDGKRIRLLKGN

SEQ ID NO: 42858 - protein, 85 aa, unidentified
  REGION 1..85: note = Description of Unknown:cds_NZ_WFIY01000004.1_cds_WP_155863145.1_1069 target sequence
LRKFKDVDITFIVDDGKILEFDNNEVFKISDSYSTVELVRDLKSISDKGDSLRLESLLKLKRELGRSIVILVSDRKVKSKGELIF

SEQ ID NO: 42859 - protein, 85 aa, unidentified
  REGION 1..85: note = Description of Unknown:cds_NZ_WFIY01000004.1_cds_WP_155863718.1_1582 target sequence
DLDYITGMIMRIGVILSISLVALGVILILIEGHACNYSESVLFSRTSYVNSSIANINYIIKGFTNISGLSFIYLGLIVLVSVPIL

SEQ ID NO: 42860 - protein, 84 aa, unidentified
  REGION 1..84: note = Description of Unknown:cds_NZ_WFIY01000004.1_cds_WP_155863718.1_1582 target sequence
LFSRTSYVNSSIANINYIIKGFTNISGLSFIYLGLIVLVSVPILRTALALAYFAYEKNKLYIILTIIVLFNLVFAILFLPSIIK

SEQ ID NO: 42861 - protein, 85 aa, unidentified
  REGION 1..85: note = Description of Unknown:cds_NZ_WFIY01000004.1_cds_WP_155863718.1_1582 target sequence
ILIEGHACNYSESVLFSRTSYVNSSIANINYIIKGFTNISGLSFIYLGLIVLVSVPILRTALALAYFAYEKNKLYIILTIIVLFN

SEQ ID NO: 42862 - protein, 85 aa, unidentified
  REGION 1..85: note = Description of Unknown:cds_NZ_WFIY01000004.1_cds_WP_155864036.1_1970 target sequence
IRYKGYVAFFYCDKDVNIIVNRKNEFELKKGYYAYVGSCGLHCDKRISRHISGEEKMKKHWHVDYISSICIPLGVIVLPLSEKEI

SEQ ID NO: 42863 - protein, 84 aa, unidentified
  REGION 1..84: note = Description of Unknown:cds_NZ_WFIY01000004.1_cds_WP_155864036.1_1970 target sequence
HCDKRISRHISGEEKMKKHWHVDYISSICIPLGVIVLPLSEKEIVSRLSSLPGIKGFGNTDDKTSLTHLFRSSIEEVMERIFLS

SEQ ID NO: 42864 - protein, 85 aa, unidentified
  REGION 1..85: note = Description of Unknown:cds_NZ_WFIY01000004.1_cds_WP_155864036.1_1970 target sequence
LKKGYYAYVGSCGLHCDKRISRHISGEEKMKKHWHVDYISSICIPLGVIVLPLSEKEIVSRLSSLPGIKGFGNTDDKTSLTHLFR

SEQ ID NO: 42865 - protein, 85 aa, unidentified
  REGION 1..85: note = Description of Unknown:cds_NZ_WFIY01000004.1_cds_WP_155864210.1_2178 target sequence
LKQNSIILGVVGGILSFIWAYDHFPLYNISLLPYGIRLFFVIDSVIAIVAGIIMIMIFKLAYLKFLYVLNLVFWWINYLLLTLTR

SEQ ID NO: 42866 - protein, 84 aa, unidentified
  REGION 1..84: note = Description of Unknown:cds_NZ_WFIY01000004.1_cds_WP_155864210.1_2178 target sequence
IDSVIAIVAGIIMIMIFKLAYLKFLYVLNLVFWWINYLLLTLTRVLPAPLIGKPLPYTGGPALIAFILDVLLIIVSTVIVYMNS

SEQ ID NO: 42867 - protein, 85 aa, unidentified
  REGION 1..85: note = Description of Unknown:cds_NZ_WFIY01000004.1_cds_WP_155864210.1_2178 target sequence
NISLLPYGIRLFFVIDSVIAIVAGIIMIMIFKLAYLKFLYVLNLVFWWINYLLLTLTRVLPAPLIGKPLPYTGGPALIAFILDVL

SEQ ID NO: 42868 - protein, 85 aa, unidentified
  REGION 1..85: note = Description of Unknown:cds_NZ_WFIY01000004.1_cds_WP_155864486.1_2199 target sequence
EVEKYEYTVGPAGEEFFKGLKQGKIIGCKCSKCGKIYIPARAYCENCFAKIDNYVEIKKEEAYVDSYTIIYKDDEGRQLDKPIYI

SEQ ID NO: 42869 - protein, 84 aa, unidentified
  REGION 1..84: note = Description of Unknown:cds_NZ_WFIY01000004.1_cds_WP_155864486.1_2199 target sequence
AYCENCFAKIDNYVEIKKEEAYVDSYTIIYKDDEGRQLDKPIYIAMIRFPNTVGGLLCYAEGNVRVGGKAKITSFDWPLRVIVE

SEQ ID NO: 42870 - protein, 85 aa, unidentified
  REGION 1..85: note = Description of Unknown:cds_NZ_WFIY01000004.1_cds_WP_155864486.1_2199 target sequence
CKCSKCGKIYIPARAYCENCFAKIDNYVEIKKEEAYVDSYTIIYKDDEGRQLDKPIYIAMIRFPNTVGGLLCYAEGNVRVGGKAK

SEQ ID NO: 42871 - protein, 85 aa, unidentified
  REGION 1..85: note = Description of Unknown:cds_NZ_WFIY01000004.1_cds_WP_155862354.1_85 target sequence
LKSDKILEYCRTPKSFTELKELTGLSDAGLYKALNKFLEEGLIRKTEEGKYVTTDKGEKAYNTQLKSLMEEGIWIEYYGIGEDKI

SEQ ID NO: 42872 - protein, 84 aa, unidentified
  REGION 1..84: note = Description of Unknown:cds_NZ_WFIY01000004.1_cds_WP_155862354.1_85 target sequence
LIRKTEEGKYVTTDKGEKAYNTQLKSLMEEGIWIEYYGIGEDKIREILKILKSVKGEFYLKASKSADESLLEQLIILQELNRNE

SEQ ID NO: 42873 - protein, 85 aa, unidentified
  REGION 1..85: note = Description of Unknown:cds_NZ_WFIY01000004.1_cds_WP_155862354.1_85 target sequence
AGLYKALNKFLEEGLIRKTEEGKYVTTDKGEKAYNTQLKSLMEEGIWIEYYGIGEDKIREILKILKSVKGEFYLKASKSADESLL

SEQ ID NO: 42874 - protein, 85 aa, unidentified
  REGION 1..85: note = Description of Unknown:cds_NZ_WFIY01000004.1_cds_WP_205737132.1_477 target sequence
VKLSEIVTKFKLSEESEIEVKDNIEFEEVDVDIGTRVLLTNGKRRRIVDLGILSIIYKNCSKEFVKDYLDLSHSLEYIHDKYGVY

SEQ ID NO: 42875 - protein, 84 aa, unidentified
  REGION 1..84: note = Description of Unknown:cds_NZ_WFIY01000004.1_cds_WP_205737132.1_477 target sequence
GKRRRIVDLGILSIIYKNCSKEFVKDYLDLSHSLEYIHDKYGVYTELEYLAINCESFVKDKDVLATIKELKAYILSRENRQHGF

SEQ ID NO: 42876 - protein, 85 aa, unidentified
  REGION 1..85: note = Description of Unknown:cds_NZ_WFIY01000004.1_cds_WP_205737132.1_477 target sequence
EVDVDIGTRVLLTNGKRRRIVDLGILSIIYKNCSKEFVKDYLDLSHSLEYIHDKYGVYTELEYLAINCESFVKDKDVLATIKELK

SEQ ID NO: 42877 - protein, 85 aa, unidentified
  REGION 1..85: note = Description of Unknown:cds_NZ_WFIY01000004.1_cds_WP_155862853.1_688 target sequence
KEIIYTEKAPRPIGPYSQAVKMGNLIFISGQIPLDPKSNNVVNGGIKEQTAQVLENIKAILEAAGSGLDKVLMSFVYLKNMNDFQ

SEQ ID NO: 42878 - protein, 84 aa, unidentified
  REGION 1..84: note = Description of Unknown:cds_NZ_WFIY01000004.1_cds_WP_155862853.1_688 target sequence
VVNGGIKEQTAQVLENIKAILEAAGSGLDKVLMSFVYLKNMNDFQGFNEVYSMYFKDNPPARVTVEVSKLPKDVLIEIAVVAGI

SEQ ID NO: 42879 - protein, 85 aa, unidentified
  REGION 1..85: note = Description of Unknown:cds_NZ_WFIY01000004.1_cds_WP_155862853.1_688 target sequence
ISGQIPLDPKSNNVVNGGIKEQTAQVLENIKAILEAAGSGLDKVLMSFVYLKNMNDFQGFNEVYSMYFKDNPPARVTVEVSKLPK

SEQ ID NO: 42880 - protein, 85 aa, unidentified
  REGION 1..85: note = Description of Unknown:cds_NZ_WFIY01000004.1_cds_WP_013775398.1_1015 target sequence
SKPSYVKFEVPQDLVDKALEVLKKAKESGKIKKGTNETTKAVERGQAKLVYIAEDVQPEEIVAHLPGLCEEKKVPYIYVPSKKAL

SEQ ID NO: 42881 - protein, 84 aa, unidentified
  REGION 1..84: note = Description of Unknown:cds_NZ_WFIY01000004.1_cds_WP_013775398.1_1015 target sequence
AVERGQAKLVYIAEDVQPEEIVAHLPGLCEEKKVPYIYVPSKKALGEACGLQVAAASAAIIDPGEAKDALDEVLKKLQEISGKS

SEQ ID NO: 42882 - protein, 85 aa, unidentified
  REGION 1..85: note = Description of Unknown:cds_NZ_WFIY01000004.1_cds_WP_013775398.1_1015 target sequence
SGKIKKGTNETTKAVERGQAKLVYIAEDVQPEEIVAHLPGLCEEKKVPYIYVPSKKALGEACGLQVAAASAAIIDPGEAKDALDE

SEQ ID NO: 42883 - protein, 85 aa, unidentified
  REGION 1..85: note = Description of Unknown:cds_NZ_WFIY01000004.1_cds_WP_155863601.1_1507 target sequence
KGMWSSFTTLIILIATVFASLVVVFYAYSMLGAQNQSVIVTQASPGIIKDGQLCVSLQTNSQIKIVKLQVEGYCEVENVILKPGL

SEQ ID NO: 42884 - protein, 84 aa, unidentified
  REGION 1..84: note = Description of Unknown:cds_NZ_WFIY01000004.1_cds_WP_155863601.1_1507 target sequence
TQASPGIIKDGQLCVSLQTNSQIKIVKLQVEGYCEVENVILKPGLNNVALTLPSGFSPLKCEAYSFTLVLCNGESVYVNAKYYC

SEQ ID NO: 42885 - protein, 85 aa, unidentified
  REGION 1..85: note = Description of Unknown:cds_NZ_WFIY01000004.1_cds_WP_155863601.1_1507 target sequence
YSMLGAQNQSVIVTQASPGIIKDGQLCVSLQTNSQIKIVKLQVEGYCEVENVILKPGLNNVALTLPSGFSPLKCEAYSFTLVLCN

SEQ ID NO: 42886 - protein, 85 aa, unidentified
  REGION 1..85: note = Description of Unknown:cds_NZ_WFIY01000004.1_cds_WP_155863944.1_1862 target sequence
QPDYRPIIALIYVKDEELTETFRKMFKDVRLLGGKKIVANVISNSEYWNFFANAREAILDNLDLGLEIFTWKPNEVDKMIKKIQQ

SEQ ID NO: 42887 - protein, 84 aa, unidentified
  REGION 1..84: note = Description of Unknown:cds_NZ_WFIY01000004.1_cds_WP_155863944.1_1862 target sequence
VISNSEYWNFFANAREAILDNLDLGLEIFTWKPNEVDKMIKKIQQYNYKGFITYCSDENKYHMRKILDNLPTSMKANMLRDYCK

SEQ ID NO: 42888 - protein, 85 aa, unidentified
  REGION 1..85: note = Description of Unknown:cds_NZ_WFIY01000004.1_cds_WP_155863944.1_1862 target sequence
DVRLLGGKKIVANVISNSEYWNFFANAREAILDNLDLGLEIFTWKPNEVDKMIKKIQQYNYKGFITYCSDENKYHMRKILDNLPT

SEQ ID NO: 42889 - protein, 85 aa, unidentified
  REGION 1..85: note = Description of Unknown:cds_NZ_WFIY01000004.1_cds_WP_155864102.1_2050 target sequence
DFKIQFPDGRQVDFHKLVEFLYGITDSEMNILHLLLSTDEKLSVEDISERLKIAKTSISKPVNILLSKGLIMRDKTEGEGKRRPK

SEQ ID NO: 42890 - protein, 84 aa, unidentified
  REGION 1..84: note = Description of Unknown:cds_NZ_WFIY01000004.1_cds_WP_155864102.1_2050 target sequence
KLSVEDISERLKIAKTSISKPVNILLSKGLIMRDKTEGEGKRRPKYLYYTDKNAVYNKIVNDLEAIAKIFCEKYKSHIESVTIK

SEQ ID NO: 42891 - protein, 85 aa, unidentified
  REGION 1..85: note = Description of Unknown:cds_NZ_WFIY01000004.1_cds_WP_155864102.1_2050 target sequence
EMNILHLLLSTDEKLSVEDISERLKIAKTSISKPVNILLSKGLIMRDKTEGEGKRRPKYLYYTDKNAVYNKIVNDLEAIAKIFCE

SEQ ID NO: 42892 - protein, 85 aa, unidentified
  REGION 1..85: note = Description of Unknown:cds_NC_035460.1_cds_YP_009408008.1_57 target sequence
KPTLILFGSNSCPSCRTINELISELKDDYNIIRINTISFFSKDGQIKSLGIDNSIIFINNFLQHLGNKFAALFKYNPETKELAYV

SEQ ID NO: 42893 - protein, 84 aa, unidentified
  REGION 1..84: note = Description of Unknown:cds_NC_035460.1_cds_YP_009408008.1_57 target sequence
SKDGQIKSLGIDNSIIFINNFLQHLGNKFAALFKYNPETKELAYVDLEAYSYTSRIGKEYIKIEDFKKKIDNANYNVWPPENTE

SEQ ID NO: 42894 - protein, 85 aa, unidentified
  REGION 1..85: note = Description of Unknown:cds_NC_035460.1_cds_YP_009408008.1_57 target sequence
DYNIIRINTISFFSKDGQIKSLGIDNSIIFINNFLQHLGNKFAALFKYNPETKELAYVDLEAYSYTSRIGKEYIKIEDFKKKIDN

SEQ ID NO: 42895 - protein, 85 aa, unidentified
  REGION 1..85: note = Description of Unknown:cds_NC_035464.1_cds_YP_009408152.1_6 target sequence
SQSQPTQEQTPPQEEGKDESQWTECEVCGKKVRMNMYKRHMSAVHGFITKEEYQRLKEEVEKTIQSTIHSALQEHWKGHYKSLSE

SEQ ID NO: 42896 - protein, 84 aa, unidentified
  REGION 1..84: note = Description of Unknown:cds_NC_035464.1_cds_YP_009408152.1_6 target sequence
MSAVHGFITKEEYQRLKEEVEKTIQSTIHSALQEHWKGHYKSLSELLEEGEKHAETCPTCQKELEEWLKKKRNEKYKPANRKWL

SEQ ID NO: 42897 - protein, 85 aa, unidentified
  REGION 1..85: note = Description of Unknown:cds_NC_035464.1_cds_YP_009408152.1_6 target sequence
CGKKVRMNMYKRHMSAVHGFITKEEYQRLKEEVEKTIQSTIHSALQEHWKGHYKSLSELLEEGEKHAETCPTCQKELEEWLKKKR

SEQ ID NO: 42898 - protein, 85 aa, unidentified
  REGION 1..85: note = Description of Unknown:hvTR_Q69567.1 target sequence
SLLDLSYLRLFGNFSKYLKNIYTYSYRPDPMMEESIKEILEESLMCDTSFDDLIIPGLESFGLIIPESSNNIESNNVEEGSDGEL

SEQ ID NO: 42899 - protein, 84 aa, unidentified
  REGION 1..84: note = Description of Unknown:hvTR_Q69567.1 target sequence
EESLMCDTSFDDLIIPGLESFGLIIPESSNNIESNNVEEGSDGELKTLAGKYMNYIICPKIENKKKHSFKHVTYNILRISSFTS

SEQ ID NO: 42900 - protein, 85 aa, unidentified
  REGION 1..85: note = Description of Unknown:hvTR_Q69567.1 target sequence
PDPMMEESIKEILEESLMCDTSFDDLIIPGLESFGLIIPESSNNIESNNVEEGSDGELKTLAGKYMNYIICPKIENKKKHSFKHV

SEQ ID NO: 42901 - protein, 85 aa, unidentified
  REGION 1..85: note = Description of Unknown:hvTR_P04543 target sequence
DTTHNDNTPQRLMITDMRPLSLETIITSLTRDIITHKFIYLINHECIVRKLDEKQATFTFLVNYEMKLLHKVGSTKYKKYTEYNT

SEQ ID NO: 42902 - protein, 84 aa, unidentified
  REGION 1..84: note = Description of Unknown:hvTR_P04543 target sequence
YLINHECIVRKLDEKQATFTFLVNYEMKLLHKVGSTKYKKYTEYNTKYGTFPMPIFINHDGFLECIGIKPTKHTPIIYKYDLNP

SEQ ID NO: 42903 - protein, 85 aa, unidentified
  REGION 1..85: note = Description of Unknown:hvTR_P04543 target sequence
SLTRDIITHKFIYLINHECIVRKLDEKQATFTFLVNYEMKLLHKVGSTKYKKYTEYNTKYGTFPMPIFINHDGFLECIGIKPTKH

SEQ ID NO: 42904 - protein, 85 aa, unidentified
  REGION 1..85: note = Description of Unknown:cds_NZ_WFIY01000004.1_cds_WP_155862456.1_208 target sequence
ESNISSYENLIQEKILEKGDEGISQQELAKSVGLSTRELSMIVKRLIEKKVIVKRTVKENGKSVVKLFATKSSSINNDIYINLDS

SEQ ID NO: 42905 - protein, 84 aa, unidentified
  REGION 1..84: note = Description of Unknown:cds_NZ_WFIY01000004.1_cds_WP_155862456.1_208 target sequence
SMIVKRLIEKKVIVKRTVKENGKSVVKLFATKSSSINNDIYINLDSVREIPCFSCKLLYKCNNGAHVNPGSCSKLSEWILYLVG

SEQ ID NO: 42906 - protein, 85 aa, unidentified
  REGION 1..85: note = Description of Unknown:cds_NZ_WFIY01000004.1_cds_WP_155862456.1_208 target sequence
LAKSVGLSTRELSMIVKRLIEKKVIVKRTVKENGKSVVKLFATKSSSINNDIYINLDSVREIPCFSCKLLYKCNNGAHVNPGSCS

SEQ ID NO: 42907 - protein, 85 aa, unidentified
  REGION 1..85: note = Description of Unknown:cds_NZ_WFIY01000004.1_cds_WP_155862465.1_218 target sequence
SITPPCEISVKEILPAVRSIIATKLVKEKGLPLYEAAKKMGITPAAVANYMNKKRGNSVRELIEHDKKMMEMISDFVEKVYLGTN

SEQ ID NO: 42908 - protein, 84 aa, unidentified
  REGION 1..84: note = Description of Unknown:cds_NZ_WFIY01000004.1_cds_WP_155862465.1_218 target sequence
MGITPAAVANYMNKKRGNSVRELIEHDKKMMEMISDFVEKVYLGTNEDLSNYYCMLCSEGKKVLKRSGIDVPLCAYESSLMLKQ

SEQ ID NO: 42909 - protein, 85 aa, unidentified
  REGION 1..85: note = Description of Unknown:cds_NZ_WFIY01000004.1_cds_WP_155862465.1_218 target sequence
EKGLPLYEAAKKMGITPAAVANYMNKKRGNSVRELIEHDKKMMEMISDFVEKVYLGTNEDLSNYYCMLCSEGKKVLKRSGIDVPL

SEQ ID NO: 42910 - protein, 85 aa, unidentified
  REGION 1..85: note = Description of Unknown:cds_NZ_WFIY01000004.1_cds_WP_155862780.1_595 target sequence
DKYSLKDYYLWKLQGDLVYVLDIDGNIAGVIDIIENNDSLLIDMLARNILVKAEKVGSRMLDFAEYLAKIKGKKLVKLEALDTAI

SEQ ID NO: 42911 - protein, 84 aa, unidentified
  REGION 1..84: note = Description of Unknown:cds_NZ_WFIY01000004.1_cds_WP_155862780.1_595 target sequence
LLIDMLARNILVKAEKVGSRMLDFAEYLAKIKGKKLVKLEALDTAIGFYKKMGYKEVYKRFDREWGLLTVMEKEIEKYVTEPAY

SEQ ID NO: 42912 - protein, 85 aa, unidentified
  REGION 1..85: note = Description of Unknown:cds_NZ_WFIY01000004.1_cds_WP_155862780.1_595 target sequence
AGVIDIIENNDSLLIDMLARNILVKAEKVGSRMLDFAEYLAKIKGKKLVKLEALDTAIGFYKKMGYKEVYKRFDREWGLLTVMEK

SEQ ID NO: 42913 - protein, 85 aa, unidentified
  REGION 1..85: note = Description of Unknown:cds_NZ_WFIY01000004.1_cds_WP_155863190.1_1122 target sequence
IKEELLLYIKEGRKEDFLKKISSILPPSDDVSISLGKMGLYEYVIDRNGFSLIQMAEDEYLPYLSSNEKRIEFHQIPKTLIEKID

SEQ ID NO: 42914 - protein, 84 aa, unidentified
  REGION 1..84: note = Description of Unknown:cds_NZ_WFIY01000004.1_cds_WP_155863190.1_1122 target sequence
LYEYVIDRNGFSLIQMAEDEYLPYLSSNEKRIEFHQIPKTLIEKIDYVKVLEQLKSILEQFGGRDKKYSSLAKEVGELIEALRN

SEQ ID NO: 42915 - protein, 85 aa, unidentified
  REGION 1..85: note = Description of Unknown:cds_NZ_WFIY01000004.1_cds_WP_155863190.1_1122 target sequence
SDDVSISLGKMGLYEYVIDRNGFSLIQMAEDEYLPYLSSNEKRIEFHQIPKTLIEKIDYVKVLEQLKSILEQFGGRDKKYSSLAK

SEQ ID NO: 42916 - protein, 85 aa, unidentified
  REGION 1..85: note = Description of Unknown:cds_NZ_WFIY01000004.1_cds_WP_155863207.1_1148 target sequence
DFYLSNISKVDKEEVPIKGAKGAKIQWLITKNEGAHYAVRKFSLEKMGVIPMHVHKYQETVIITKGKCKVCVADKEFELKEGDYI

SEQ ID NO: 42917 - protein, 84 aa, unidentified
  REGION 1..84: note = Description of Unknown:cds_NZ_WFIY01000004.1_cds_WP_155863207.1_1148 target sequence
RKFSLEKMGVIPMHVHKYQETVIITKGKCKVCVADKEFELKEGDYIFIDSQVKHAIIAEDELEFFCVIDYVDDMSIKTLNEDCP

SEQ ID NO: 42918 - protein, 85 aa, unidentified
  REGION 1..85: note = Description of Unknown:cds_NZ_WFIY01000004.1_cds_WP_155863207.1_1148 target sequence
LITKNEGAHYAVRKFSLEKMGVIPMHVHKYQETVIITKGKCKVCVADKEFELKEGDYIFIDSQVKHAIIAEDELEFFCVIDYVDD

SEQ ID NO: 42919 - protein, 85 aa, unidentified
  REGION 1..85: note = Description of Unknown:cds_NZ_WFIY01000004.1_cds_1923 target sequence
LTSYVKKEISKKIEELSRSFYENVLPPVDIYEEGGYLNIDVDLPGFQKDKIHLRLTSSNEMIIEAERELPEGGVKYLTQRPKRIS

SEQ ID NO: 42920 - protein, 84 aa, unidentified
  REGION 1..84: note = Description of Unknown:cds_NZ_WFIY01000004.1_cds_1923 target sequence
VDLPGFQKDKIHLRLTSSNEMIIEAERELPEGGVKYLTQRPKRISRVIRLPVAVKKDTQVTAKYENGVLHISIPVEGTTTIKIE

SEQ ID NO: 42921 - protein, 85 aa, unidentified
  REGION 1..85: note = Description of Unknown:cds_NZ_WFIY01000004.1_cds_1923 target sequence
VDIYEEGGYLNIDVDLPGFQKDKIHLRLTSSNEMIIEAERELPEGGVKYLTQRPKRISRVIRLPVAVKKDTQVTAKYENGVLHIS

SEQ ID NO: 42922 - protein, 85 aa, unidentified
  REGION 1..85: note = Description of Unknown:cds_NC_003214.2_cds_NP_445720.1_55 target sequence
SQPSNSGGGASKGIVKILILAMLAIGIIGLPVGLYEIGTLIATHMAVGDIENGYAYGGLMSIIYNATHISQYQQLSQILPATGVT

SEQ ID NO: 42923 - protein, 84 aa, unidentified
  REGION 1..84: note = Description of Unknown:cds_NC_003214.2_cds_NP_445720.1_55 target sequence
LIATHMAVGDIENGYAYGGLMSIIYNATHISQYQQLSQILPATGVTMGTQDITTIQIFLLLLGLFLDAPLAYMTYNIYRHLEDE

SEQ ID NO: 42924 - protein, 85 aa, unidentified
  REGION 1..85: note = Description of Unknown:cds_NC_003214.2_cds_NP_445720.1_55 target sequence
IGLPVGLYEIGTLIATHMAVGDIENGYAYGGLMSIIYNATHISQYQQLSQILPATGVTMGTQDITTIQIFLLLLGLFLDAPLAYM

SEQ ID NO: 42925 - protein, 85 aa, unidentified
  REGION 1..85: note = Description of Unknown:cds_NC_030656.1_cds_YP_009268743.1_28 target sequence
SNMHKTPFYINTAMGRVLVLKYIKVCEIPEVQCAATKAMCVLKTEEPMSPKCERAPASCPLSPSRQPQPPACPLSPSRQQPVCPL

SEQ ID NO: 42926 - protein, 84 aa, unidentified
  REGION 1..84: note = Description of Unknown:cds_NC_030656.1_cds_YP_009268743.1_28 target sequence
CVLKTEEPMSPKCERAPASCPLSPSRQPQPPACPLSPSRQQPVCPLSPTRQTVVPRNNNVPFMNTNLLENLFSSNKNAVSKILG

SEQ ID NO: 42927 - protein, 85 aa, unidentified
  REGION 1..85: note = Description of Unknown:cds_NC_030656.1_cds_YP_009268743.1_28 target sequence
IPEVQCAATKAMCVLKTEEPMSPKCERAPASCPLSPSRQPQPPACPLSPSRQQPVCPLSPTRQTVVPRNNNVPFMNTNLLENLFS

SEQ ID NO: 42928 - protein, 85 aa, unidentified
  REGION 1..85: note = Description of Unknown:cds_NC_010495.1_cds_YP_001742064.1_27 target sequence
NMLKLVDAYLQDAGLYDGWTSQLQFWNDTGDGNEQFIVLQSNGGTQVMDGLGGDFYFSLYIVGKHGQYNVSDIDAKANEIIEYIK

SEQ ID NO: 42929 - protein, 84 aa, unidentified
  REGION 1..84: note = Description of Unknown:cds_NC_010495.1_cds_YP_001742064.1_27 target sequence
QSNGGTQVMDGLGGDFYFSLYIVGKHGQYNVSDIDAKANEIIEYIKTHPIDSCVNYIHLQAPLGRPMLTEEKRPVHELLLRVVK

SEQ ID NO: 42930 - protein, 85 aa, unidentified
  REGION 1..85: note = Description of Unknown:cds_NC_010495.1_cds_YP_001742064.1_27 target sequence
DTGDGNEQFIVLQSNGGTQVMDGLGGDFYFSLYIVGKHGQYNVSDIDAKANEIIEYIKTHPIDSCVNYIHLQAPLGRPMLTEEKR

SEQ ID NO: 42931 - protein, 85 aa, unidentified
  REGION 1..85: note = Description of Unknown:cds_NZ_WFIY01000004.1_cds_WP_148230295.1_441 target sequence
MGINQEVPKVIGKQVYGSLYDCDEEVLKDVEKLKNIVINAAKIGNMTLLDVKAWKIGEGASVVAIVLESHITIHTWPEYKFATVD

SEQ ID NO: 42932 - protein, 84 aa, unidentified
  REGION 1..84: note = Description of Unknown:cds_NZ_WFIY01000004.1_cds_WP_148230295.1_441 target sequence
NAAKIGNMTLLDVKAWKIGEGASVVAIVLESHITIHTWPEYKFATVDVYSCGAKSDPKKAFAYIVKELGAKRYSMNEADRSSDF

SEQ ID NO: 42933 - protein, 85 aa, unidentified
  REGION 1..85: note = Description of Unknown:cds_NZ_WFIY01000004.1_cds_WP_148230295.1_441 target sequence
KDVEKLKNIVINAAKIGNMTLLDVKAWKIGEGASVVAIVLESHITIHTWPEYKFATVDVYSCGAKSDPKKAFAYIVKELGAKRYS

SEQ ID NO: 42934 - protein, 85 aa, unidentified
  REGION 1..85: note = Description of Unknown:cds_NZ_WFIY01000004.1_cds_601 target sequence
IQVLELEKAEDVKELALRINEETNMGIDLNKIVFLRSKNSKTTAIARTLTLPPQWRYVLGDNVLYIIEVVSEKYDKLECSDKVFV

SEQ ID NO: 42935 - protein, 84 aa, unidentified
  REGION 1..84: note = Description of Unknown:cds_NZ_WFIY01000004.1_cds_601 target sequence
SKTTAIARTLTLPPQWRYVLGDNVLYIIEVVSEKYDKLECSDKVFVITHELMHIPRTMKGLRNHNYKGFKQIRKISKELAKVLC

SEQ ID NO: 42936 - protein, 85 aa, unidentified
  REGION 1..85: note = Description of Unknown:cds_NZ_WFIY01000004.1_cds_601 target sequence
DLNKIVFLRSKNSKTTAIARTLTLPPQWRYVLGDNVLYIIEVVSEKYDKLECSDKVFVITHELMHIPRTMKGLRNHNYKGFKQIR

SEQ ID NO: 42937 - protein, 85 aa, unidentified
  REGION 1..85: note = Description of Unknown:cds_NZ_WFIY01000004.1_cds_WP_155862899.1_749 target sequence
TSSKPAKQRKILFNAPYHLRRKMLTAMVSEEITKEYGIKRIEVKKGDTVKVMRGDNIGFEGKVAQVNTKTGRIAIEGLTRKKADG

SEQ ID NO: 42938 - protein, 84 aa, unidentified
  REGION 1..84: note = Description of Unknown:cds_NZ_WFIY01000004.1_cds_WP_155862899.1_749 target sequence
KRIEVKKGDTVKVMRGDNIGFEGKVAQVNTKTGRIAIEGLTRKKADGTPVYIWIHASKVMITKLDLSDNKRKASIERKVKQVSK

SEQ ID NO: 42939 - protein, 85 aa, unidentified
  REGION 1..85: note = Description of Unknown:cds_NZ_WFIY01000004.1_cds_WP_155862899.1_749 target sequence
VSEEITKEYGIKRIEVKKGDTVKVMRGDNIGFEGKVAQVNTKTGRIAIEGLTRKKADGTPVYIWIHASKVMITKLDLSDNKRKAS

SEQ ID NO: 42940 - protein, 85 aa, unidentified
  REGION 1..85: note = Description of Unknown:cds_NZ_WFIY01000004.1_cds_WP_155863859.1_1760 target sequence
KSLEFRIPLIGSAISLFIGGLLLIGKVPSILTLGTMIIVVILVSLAFLITRYNNLIHAGGILGILAIISSATAPAHEEALLNFGK

SEQ ID NO: 42941 - protein, 84 aa, unidentified
  REGION 1..84: note = Description of Unknown:cds_NZ_WFIY01000004.1_cds_WP_155863859.1_1760 target sequence
VVILVSLAFLITRYNNLIHAGGILGILAIISSATAPAHEEALLNFGKSLYITTLDLLMVLGFYVFPIIYIYFWVFTIIRRKTIT

SEQ ID NO: 42942 - protein, 85 aa, unidentified
  REGION 1..85: note = Description of Unknown:cds_NZ_WFIY01000004.1_cds_WP_155863859.1_1760 target sequence
PSILTLGTMIIVVILVSLAFLITRYNNLIHAGGILGILAIISSATAPAHEEALLNFGKSLYITTLDLLMVLGFYVFPIIYIYFWV

SEQ ID NO: 42943 - protein, 85 aa, unidentified
  REGION 1..85: note = Description of Unknown:cds_NZ_WFIY01000004.1_cds_WP_155864471.1_1962 target sequence
HYGFNAVRIPTSNSSPNPLPDVFATKGNILLSIEVKSTWQKKVKVEENQIRKILDFLKMFPMEGKALIVVKFKGGIGWRVKEVEV

SEQ ID NO: 42944 - protein, 84 aa, unidentified
  REGION 1..84: note = Description of Unknown:cds_NZ_WFIY01000004.1_cds_WP_155864471.1_1962 target sequence
WQKKVKVEENQIRKILDFLKMFPMEGKALIVVKFKGGIGWRVKEVEVAKEEEVNEENSISLEDYLLNLQSNLLQSLNQRPYQIL

SEQ ID NO: 42945 - protein, 85 aa, unidentified
  REGION 1..85: note = Description of Unknown:cds_NZ_WFIY01000004.1_cds_WP_155864471.1_1962 target sequence
NILLSIEVKSTWQKKVKVEENQIRKILDFLKMFPMEGKALIVVKFKGGIGWRVKEVEVAKEEEVNEENSISLEDYLLNLQSNLLQ

SEQ ID NO: 42946 - protein, 85 aa, unidentified
  REGION 1..85: note = Description of Unknown:cds_NZ_WFIY01000004.1_cds_WP_155864080.1_2020 target sequence
EVQKLKVKLPSGKEVGLLDALLFCYDISDTDFKVLKELIKNGPKNEDELAAELKLSKASVNRSLNKLLSIGFVQRMKDQSSKGGR

SEQ ID NO: 42947 - protein, 84 aa, unidentified
  REGION 1..84: note = Description of Unknown:cds_NZ_WFIY01000004.1_cds_WP_155864080.1_2020 target sequence
IKNGPKNEDELAAELKLSKASVNRSLNKLLSIGFVQRMKDQSSKGGRPRFIYSAISSDELVNKISRDFEYCAKIFINITPAELK

SEQ ID NO: 42948 - protein, 85 aa, unidentified
  REGION 1..85: note = Description of Unknown:cds_NZ_WFIY01000004.1_cds_WP_155864080.1_2020 target sequence
SDTDFKVLKELIKNGPKNEDELAAELKLSKASVNRSLNKLLSIGFVQRMKDQSSKGGRPRFIYSAISSDELVNKISRDFEYCAKI

SEQ ID NO: 42949 - protein, 85 aa, unidentified
  REGION 1..85: note = Description of Unknown:cds_NZ_WFIY01000004.1_cds_2057 target sequence
VRVVLDASAILLYFYGNESVKEIISRSKEVYVNPVNLTEFLYSYTKVKGWKKALFKYTLVRNSFKVIDITDEIVRTSAKLKVKYN

SEQ ID NO: 42950 - protein, 84 aa, unidentified
  REGION 1..84: note = Description of Unknown:cds_NZ_WFIY01000004.1_cds_2057 target sequence
FLYSYTKVKGWKKALFKYTLVRNSFKVIDITDEIVRTSAKLKVKYNLSLGDSFLLASAISINGNAVTSDHELEDVKEAKVILVR

SEQ ID NO: 42951 - protein, 85 aa, unidentified
  REGION 1..85: note = Description of Unknown:cds_NZ_WFIY01000004.1_cds_2057 target sequence
KEVYVNPVNLTEFLYSYTKVKGWKKALFKYTLVRNSFKVIDITDEIVRTSAKLKVKYNLSLGDSFLLASAISINGNAVTSDHELE

SEQ ID NO: 42952 - protein, 85 aa, unidentified
  REGION 1..85: note = Description of Unknown:cds_NC_029316.1_cds_YP_009230295.1_42 target sequence
EAQLLSSIREINISLNQFYVILKCFSKHGVYSIRKIRKKIKNLLKDIIPHDFDRAYRVEFIQENRKELALKSLLKCKGEVPILRI

SEQ ID NO: 42953 - protein, 84 aa, unidentified
  REGION 1..84: note = Description of Unknown:cds_NC_029316.1_cds_YP_009230295.1_42 target sequence
KIKNLLKDIIPHDFDRAYRVEFIQENRKELALKSLLKCKGEVPILRIHTFCYTIVISVVNIRISGKGGEKSVYMQVKLDYIYGS

SEQ ID NO: 42954 - protein, 85 aa, unidentified
  REGION 1..85: note = Description of Unknown:cds_NC_029316.1_cds_YP_009230295.1_42 target sequence
HGVYSIRKIRKKIKNLLKDIIPHDFDRAYRVEFIQENRKELALKSLLKCKGEVPILRIHTFCYTIVISVVNIRISGKGGEKSVYM

SEQ ID NO: 42955 - protein, 85 aa, unidentified
  REGION 1..85: note = Description of Unknown:cds_NC_030656.1_cds_YP_009268784.1_69 target sequence
STTVNLSPVFVAPTFEHSLLRADKYIFIELFEFIVVVFLVYVFFKDEIVSMFTPVTPINELDKYKDTYLTCYGNKLYIISDNKQL

SEQ ID NO: 42956 - protein, 84 aa, unidentified
  REGION 1..84: note = Description of Unknown:cds_NC_030656.1_cds_YP_009268784.1_69 target sequence
LVYVFFKDEIVSMFTPVTPINELDKYKDTYLTCYGNKLYIISDNKQLPALSLNFKQIEFEGCSTILRNINGSRTVRISDVLNRQ

SEQ ID NO: 42957 - protein, 85 aa, unidentified
  REGION 1..85: note = Description of Unknown:cds_NC_030656.1_cds_YP_009268784.1_69 target sequence
IELFEFIVVVFLVYVFFKDEIVSMFTPVTPINELDKYKDTYLTCYGNKLYIISDNKQLPALSLNFKQIEFEGCSTILRNINGSRT

SEQ ID NO: 42958 - protein, 85 aa, unidentified
  REGION 1..85: note = Description of Unknown:cds_NC_043030.1_cds_YP_009664540.1_5 target sequence
VLSHKYTAEELIQRALYLVLCQKSEVIDLYVDLAVKTRSTTIARVIINYLREAGFVETVGYCKNKDLTKCPHLELRATETGRVWW

SEQ ID NO: 42959 - protein, 84 aa, unidentified
  REGION 1..84: note = Description of Unknown:cds_NC_043030.1_cds_YP_009664540.1_5 target sequence
TTIARVIINYLREAGFVETVGYCKNKDLTKCPHLELRATETGRVWWCIRVDPSIHKMNNKPCNKDCLAYLLRNKPEALKTPLGP

SEQ ID NO: 42960 - protein, 85 aa, unidentified
  REGION 1..85: note = Description of Unknown:cds_NC_043030.1_cds_YP_009664540.1_5 target sequence
DLYVDLAVKTRSTTIARVIINYLREAGFVETVGYCKNKDLTKCPHLELRATETGRVWWCIRVDPSIHKMNNKPCNKDCLAYLLRN

SEQ ID NO: 42961 - protein, 85 aa, unidentified
  REGION 1..85: note = Description of Unknown:hvTR_Q98817 target sequence
SDQLEIDGQRTEQLILARRKLKQQNQELFNLQALHQCKKGLFCLVKQAELCYDVTQQGHELSYTLNKQRQSFMTMVGVKPIKVTQ

SEQ ID NO: 42962 - protein, 84 aa, unidentified
  REGION 1..84: note = Description of Unknown:hvTR_Q98817 target sequence
KKGLFCLVKQAELCYDVTQQGHELSYTLNKQRQSFMTMVGVKPIKVTQQSGPVEGSILCQCTNSECMYTMVKTLCGLRELLPFN

SEQ ID NO: 42963 - protein, 85 aa, unidentified
  REGION 1..85: note = Description of Unknown:hvTR_Q98817 target sequence
LFNLQALHQCKKGLFCLVKQAELCYDVTQQGHELSYTLNKQRQSFMTMVGVKPIKVTQQSGPVEGSILCQCTNSECMYTMVKTLC

SEQ ID NO: 42964 - protein, 85 aa, unidentified
  REGION 1..85: note = Description of Unknown:hvTR_Q64857 target sequence
MQRDRWFRCRLSSYQTHRLPPPSEDSVPIATMERTPGLLECEHLNMHYSSALDSTVLLDDVSEGFISITDQRFASKEPVLILSQK

SEQ ID NO: 42965 - protein, 84 aa, unidentified
  REGION 1..84: note = Description of Unknown:hvTR_Q64857 target sequence
LLECEHLNMHYSSALDSTVLLDDVSEGFISITDQRFASKEPVLILSQKNRCVNPKLQLFAVVQGEREVYKVKWKGGGRLTVRIL

SEQ ID NO: 42966 - protein, 85 aa, unidentified
  REGION 1..85: note = Description of Unknown:hvTR_Q64857 target sequence
PIATMERTPGLLECEHLNMHYSSALDSTVLLDDVSEGFISITDQRFASKEPVLILSQKNRCVNPKLQLFAVVQGEREVYKVKWKG

SEQ ID NO: 42967 - protein, 85 aa, unidentified
  REGION 1..85: note = Description of Unknown:cds_NZ_WFIY01000004.1_cds_193 target sequence
VKIKDIIDLPLPGLKESLEYGISEAEYLGKEFIGITLSNGDGIILHVNPYSDEIIGAYLMTIKQNSEKRLIGVFKYEGGNTYFIY

SEQ ID NO: 42968 - protein, 84 aa, unidentified
  REGION 1..84: note = Description of Unknown:cds_NZ_WFIY01000004.1_cds_193 target sequence
NGDGIILHVNPYSDEIIGAYLMTIKQNSEKRLIGVFKYEGGNTYFIYEITDLVDYINRLTNERVVYVEVIKDVLEDFLLNAVAR

SEQ ID NO: 42969 - protein, 85 aa, unidentified
  REGION 1..85: note = Description of Unknown:cds_NZ_WFIY01000004.1_cds_193 target sequence
LGKEFIGITLSNGDGIILHVNPYSDEIIGAYLMTIKQNSEKRLIGVFKYEGGNTYFIYEITDLVDYINRLTNERVVYVEVIKDVL

SEQ ID NO: 42970 - protein, 85 aa, unidentified
  REGION 1..85: note = Description of Unknown:cds_NZ_WFIY01000004.1_cds_WP_155863706.1_1564 target sequence
SQLSILQIAKMQEKEREETMSKLFQQLLGMKDEDKIKTLKDLIREMAEKATDEEYLNLCKTNLKLASTLPDDLLKAFIQLRMQAS

SEQ ID NO: 42971 - protein, 84 aa, unidentified
  REGION 1..84: note = Description of Unknown:cds_NZ_WFIY01000004.1_cds_WP_155863706.1_1564 target sequence
TLKDLIREMAEKATDEEYLNLCKTNLKLASTLPDDLLKAFIQLRMQASSQLPKDLHDRDMKLLTKALGEIDTQIREKIIRNMPK

SEQ ID NO: 42972 - protein, 85 aa, unidentified
  REGION 1..85: note = Description of Unknown:cds_NZ_WFIY01000004.1_cds_WP_155863706.1_1564 target sequence
LGMKDEDKIKTLKDLIREMAEKATDEEYLNLCKTNLKLASTLPDDLLKAFIQLRMQASSQLPKDLHDRDMKLLTKALGEIDTQIR

SEQ ID NO: 42973 - protein, 85 aa, unidentified
  REGION 1..85: note = Description of Unknown:cds_NC_029316.1_cds_YP_009230317.1_64 target sequence
GQTIIIVASQAQLVYFYIFSFLVIAFLAVIIWLYFHGFFRKIGILSLLMFSSYIIMYESGFAFTTPTDYNVTLTNPYNTTTVVDQ

SEQ ID NO: 42974 - protein, 84 aa, unidentified
  REGION 1..84: note = Description of Unknown:cds_NC_029316.1_cds_YP_009230317.1_64 target sequence
FFRKIGILSLLMFSSYIIMYESGFAFTTPTDYNVTLTNPYNTTTVVDQPLDFYYTVFYLSFGIAIASTLLIIYEIIQYVAKRFF

SEQ ID NO: 42975 - protein, 85 aa, unidentified
  REGION 1..85: note = Description of Unknown:cds_NC_029316.1_cds_YP_009230317.1_64 target sequence
AVIIWLYFHGFFRKIGILSLLMFSSYIIMYESGFAFTTPTDYNVTLTNPYNTTTVVDQPLDFYYTVFYLSFGIAIASTLLIIYEI

SEQ ID NO: 42976 - protein, 85 aa, unidentified
  REGION 1..85: note = Description of Unknown:cds_NC_030656.1_cds_YP_009268773.1_58 target sequence
TETLILIGKPLCGICELASELLKKIEGNYNVLRINIMSLFSKEGAVRVLGMDVYSLITELTEYFSTDYVLLLKYSPEKNECAYVP

SEQ ID NO: 42977 - protein, 84 aa, unidentified
  REGION 1..84: note = Description of Unknown:cds_NC_030656.1_cds_YP_009268773.1_58 target sequence
SLFSKEGAVRVLGMDVYSLITELTEYFSTDYVLLLKYSPEKNECAYVPFKQFIVVAQIDKDAVNYKEMQKVIESASYGDWSYKK

SEQ ID NO: 42978 - protein, 85 aa, unidentified
  REGION 1..85: note = Description of Unknown:cds_NC_030656.1_cds_YP_009268773.1_58 target sequence
NYNVLRINIMSLFSKEGAVRVLGMDVYSLITELTEYFSTDYVLLLKYSPEKNECAYVPFKQFIVVAQIDKDAVNYKEMQKVIESA

SEQ ID NO: 42979 - protein, 85 aa, unidentified
  REGION 1..85: note = Description of Unknown:cds_NC_009884.1_cds_YP_001496928.1_3 target sequence
QVLQIVKEKAKMRQNMNFFETTIYEKYDLRDKIKPGQKFVVRQGDLIIVNYDIENPQKRGLRFARIIADRENGSVIEYFRNSHVI

SEQ ID NO: 42980 - protein, 84 aa, unidentified
  REGION 1..84: note = Description of Unknown:cds_NC_009884.1_cds_YP_001496928.1_3 target sequence
KFVVRQGDLIIVNYDIENPQKRGLRFARIIADRENGSVIEYFRNSHVILSGEGFTSIFHPEHGLVILPVTRDDLTFYTIDNSKD

SEQ ID NO: 42981 - protein, 85 aa, unidentified
  REGION 1..85: note = Description of Unknown:cds_NC_009884.1_cds_YP_001496928.1_3 target sequence
DLRDKIKPGQKFVVRQGDLIIVNYDIENPQKRGLRFARIIADRENGSVIEYFRNSHVILSGEGFTSIFHPEHGLVILPVTRDDLT

SEQ ID NO: 42982 - protein, 85 aa, unidentified
  REGION 1..85: note = Description of Unknown:vpeps_2J85_1 target sequence
GKVFLTNAFSINMLKEFPTTITIDKLDEEDFCLKLELRLEDGTLINAIGHDSTINLVNTLCGTQLQKNRVEVKMNEGDEALIIMI

SEQ ID NO: 42983 - protein, 85 aa, unidentified
  REGION 1..85: note = Description of Unknown:vpeps_2J85_1 target sequence
LRLEDGTLINAIGHDSTINLVNTLCGTQLQKNRVEVKMNEGDEALIIMISQRLEEGKVLSDKEIKDMYRQGKISFYEVWHHHHHH

SEQ ID NO: 42984 - protein, 85 aa, unidentified
  REGION 1..85: note = Description of Unknown:vpeps_2J85_1 target sequence
EEDFCLKLELRLEDGTLINAIGHDSTINLVNTLCGTQLQKNRVEVKMNEGDEALIIMISQRLEEGKVLSDKEIKDMYRQGKISFY

SEQ ID NO: 42985 - protein, 85 aa, unidentified
  REGION 1..85: note = Description of Unknown:cds_NZ_WFIY01000004.1_cds_WP_155862952.1_811 target sequence
IEISQTTWTADKKNIIRFDGKCVIQVIKDIPPKSVINQACYIFFKTYTKSRIKEPEIYFLTLLYSTSQIANALAHIKFKEGDVAY

SEQ ID NO: 42986 - protein, 84 aa, unidentified
  REGION 1..84: note = Description of Unknown:cds_NZ_WFIY01000004.1_cds_WP_155862952.1_811 target sequence
NQACYIFFKTYTKSRIKEPEIYFLTLLYSTSQIANALAHIKFKEGDVAYIIKCCDKDINKFEQIQIKDNSERIALSTNAINSLI

SEQ ID NO: 42987 - protein, 85 aa, unidentified
  REGION 1..85: note = Description of Unknown:cds_NZ_WFIY01000004.1_cds_WP_155862952.1_811 target sequence
KDIPPKSVINQACYIFFKTYTKSRIKEPEIYFLTLLYSTSQIANALAHIKFKEGDVAYIIKCCDKDINKFEQIQIKDNSERIALS

SEQ ID NO: 42988 - protein, 85 aa, unidentified
  REGION 1..85: note = Description of Unknown:cds_NZ_WFIY01000004.1_cds_WP_155863339.1_1306 target sequence
IIKECKFSFEECEKMVKDKIKEIGEIFAEIDHSKNAEKVGLSLPKDKVIIFGNPRAGTLLMQEKIEVSLDLPLRIAIWEKDGKTF

SEQ ID NO: 42989 - protein, 84 aa, unidentified
  REGION 1..84: note = Description of Unknown:cds_NZ_WFIY01000004.1_cds_WP_155863339.1_1306 target sequence
EKVGLSLPKDKVIIFGNPRAGTLLMQEKIEVSLDLPLRIAIWEKDGKTFLGTKMPSEIAREYGVKHDIVKKMDEAVNSIINSIT

SEQ ID NO: 42990 - protein, 85 aa, unidentified
  REGION 1..85: note = Description of Unknown:cds_NZ_WFIY01000004.1_cds_WP_155863339.1_1306 target sequence
AEIDHSKNAEKVGLSLPKDKVIIFGNPRAGTLLMQEKIEVSLDLPLRIAIWEKDGKTFLGTKMPSEIAREYGVKHDIVKKMDEAV

SEQ ID NO: 42991 - protein, 85 aa, unidentified
  REGION 1..85: note = Description of Unknown:cds_NZ_WFIY01000004.1_cds_WP_155863472.1_1431 target sequence
LSELQALEEINTAPRRVDELRLKDINIDDLINRGLVKEENGWLYLTDAGIKRLAELYGILDSLQEIYINMANGIKTKISEIDEKV

SEQ ID NO: 42992 - protein, 84 aa, unidentified
  REGION 1..84: note = Description of Unknown:cds_NZ_WFIY01000004.1_cds_WP_155863472.1_1431 target sequence
KEENGWLYLTDAGIKRLAELYGILDSLQEIYINMANGIKTKISEIDEKVLNSGLVEIKGDYVELNFEGIKLIAQRIAEKMSRAH

SEQ ID NO: 42993 - protein, 85 aa, unidentified
  REGION 1..85: note = Description of Unknown:cds_NZ_WFIY01000004.1_cds_WP_155863472.1_1431 target sequence
DDLINRGLVKEENGWLYLTDAGIKRLAELYGILDSLQEIYINMANGIKTKISEIDEKVLNSGLVEIKGDYVELNFEGIKLIAQRI

SEQ ID NO: 42994 - protein, 85 aa, unidentified
  REGION 1..85: note = Description of Unknown:cds_NZ_WFIY01000004.1_cds_WP_155863580.1_1497 target sequence
SINPVQIAQLPYTNRIDNIQKIIQTLLSMDPKTAESAVKDLLTALSKASDEDYKNWCEGTMRVISMFDDNVIKSILSLRMKVVSE

SEQ ID NO: 42995 - protein, 84 aa, unidentified
  REGION 1..84: note = Description of Unknown:cds_NZ_WFIY01000004.1_cds_WP_155863580.1_1497 target sequence
AVKDLLTALSKASDEDYKNWCEGTMRVISMFDDNVIKSILSLRMKVVSEMPKEVQDRDAKIVMEVLNSLDESVKEKLMKNMPKS

SEQ ID NO: 42996 - protein, 85 aa, unidentified
  REGION 1..85: note = Description of Unknown:cds_NZ_WFIY01000004.1_cds_WP_155863580.1_1497 target sequence
SMDPKTAESAVKDLLTALSKASDEDYKNWCEGTMRVISMFDDNVIKSILSLRMKVVSEMPKEVQDRDAKIVMEVLNSLDESVKEK

SEQ ID NO: 42997 - protein, 85 aa, unidentified
  REGION 1..85: note = Description of Unknown:cds_NZ_WFIY01000004.1_cds_WP_162309169.1_2049 target sequence
ERKVKFPDGREVDVLTIFKFVYGLSNPELEILKLLVNTKGKLSAEDIASSLNISRNTVTKPINLLLSKGLVLRDKEKGKANGRPR

SEQ ID NO: 42998 - protein, 84 aa, unidentified
  REGION 1..84: note = Description of Unknown:cds_NZ_WFIY01000004.1_cds_WP_162309169.1_2049 target sequence
NTKGKLSAEDIASSLNISRNTVTKPINLLLSKGLVLRDKEKGKANGRPRLVYFATPDIYSKLLTDLQNILNESLKEISKIRKNT

SEQ ID NO: 42999 - protein, 85 aa, unidentified
  REGION 1..85: note = Description of Unknown:cds_NZ_WFIY01000004.1_cds_WP_162309169.1_2049 target sequence
ELEILKLLVNTKGKLSAEDIASSLNISRNTVTKPINLLLSKGLVLRDKEKGKANGRPRLVYFATPDIYSKLLTDLQNILNESLKE

SEQ ID NO: 43000 - protein, 85 aa, unidentified
  REGION 1..85: note = Description of Unknown:cds_NC_009884.1_cds_YP_001496937.1_12 target sequence
LANHIIARGEIDHRLEELKNEALEEGITNVAEFTPRQLRATGFRPIWGESAKEFWSSFKYVEISLIYGVDGFSLYYEFEDDYGDL

SEQ ID NO: 43001 - protein, 84 aa, unidentified
  REGION 1..84: note = Description of Unknown:cds_NC_009884.1_cds_YP_001496937.1_12 target sequence
LRATGFRPIWGESAKEFWSSFKYVEISLIYGVDGFSLYYEFEDDYGDLVDTYWIFESNTENFWNIIRKYIEIDIIKFLSLELNS

SEQ ID NO: 43002 - protein, 85 aa, unidentified
  REGION 1..85: note = Description of Unknown:cds_NC_009884.1_cds_YP_001496937.1_12 target sequence
TNVAEFTPRQLRATGFRPIWGESAKEFWSSFKYVEISLIYGVDGFSLYYEFEDDYGDLVDTYWIFESNTENFWNIIRKYIEIDII

SEQ ID NO: 43003 - protein, 85 aa, unidentified
  REGION 1..85: note = Description of Unknown:cds_NC_024711.1_cds_YP_009052491.1_9 target sequence
DNYDSFIFDGLLDRYIEEQAKFKKGQVVYMEYTYQYHNQTKLGVCVGIVTEVGITKIERTVGNNKYINYPIVYTVTHTKGVSRCV

SEQ ID NO: 43004 - protein, 84 aa, unidentified
  REGION 1..84: note = Description of Unknown:cds_NC_024711.1_cds_YP_009052491.1_9 target sequence
YHNQTKLGVCVGIVTEVGITKIERTVGNNKYINYPIVYTVTHTKGVSRCVSECKLGSVSEHILKERLKRDGKNNEQNNESATND

SEQ ID NO: 43005 - protein, 85 aa, unidentified
  REGION 1..85: note = Description of Unknown:cds_NC_024711.1_cds_YP_009052491.1_9 target sequence
VYMEYTYQYHNQTKLGVCVGIVTEVGITKIERTVGNNKYINYPIVYTVTHTKGVSRCVSECKLGSVSEHILKERLKRDGKNNEQN

SEQ ID NO: 43006 - protein, 85 aa, unidentified
  REGION 1..85: note = Description of Unknown:cds_NZ_WFIY01000004.1_cds_WP_155862297.1_12 target sequence
TAKVMIKNMDEQLYRMLKAKAALMGISVSEAIQQAISLWLNLTEGIYDYNYIVLKTNPEALKAYKEGKYVLACDGEFIGAFDSEK

SEQ ID NO: 43007 - protein, 84 aa, unidentified
  REGION 1..84: note = Description of Unknown:cds_NZ_WFIY01000004.1_cds_WP_155862297.1_12 target sequence
ISLWLNLTEGIYDYNYIVLKTNPEALKAYKEGKYVLACDGEFIGAFDSEKEAIEMGKGHKKCMLGSKNYEQEVGEWGWSSIALE

SEQ ID NO: 43008 - protein, 85 aa, unidentified
  REGION 1..85: note = Description of Unknown:cds_NZ_WFIY01000004.1_cds_WP_155862297.1_12 target sequence
VSEAIQQAISLWLNLTEGIYDYNYIVLKTNPEALKAYKEGKYVLACDGEFIGAFDSEKEAIEMGKGHKKCMLGSKNYEQEVGEWG

SEQ ID NO: 43009 - protein, 85 aa, unidentified
  REGION 1..85: note = Description of Unknown:cds_NZ_WFIY01000004.1_cds_WP_155863356.1_1328 target sequence
SITISAEVYYEEAEELLSKGDLVQACEKYYKAAEEAIKLLVIENNLKEIIKEVENKGRWESESLFKASRLLRNKYPEIAIQWKNA

SEQ ID NO: 43010 - protein, 84 aa, unidentified
  REGION 1..84: note = Description of Unknown:cds_NZ_WFIY01000004.1_cds_WP_155863356.1_1328 target sequence
AIKLLVIENNLKEIIKEVENKGRWESESLFKASRLLRNKYPEIAIQWKNAWTLHVEGFHEISLNEKEVIKLKEDVRKLVVIATS

SEQ ID NO: 43011 - protein, 85 aa, unidentified
  REGION 1..85: note = Description of Unknown:cds_NZ_WFIY01000004.1_cds_WP_155863356.1_1328 target sequence
KYYKAAEEAIKLLVIENNLKEIIKEVENKGRWESESLFKASRLLRNKYPEIAIQWKNAWTLHVEGFHEISLNEKEVIKLKEDVRK

SEQ ID NO: 43012 - protein, 85 aa, unidentified
  REGION 1..85: note = Description of Unknown:cds_NZ_WFIY01000004.1_cds_WP_155863462.1_1426 target sequence
TGCCIQDEQDLCMEYSPKIYQLITRKYTLAILLLLDKYDKMRFNEIMRKINGITQRILSMRLKELEKAYLIRREIDKNGKTVMYS

SEQ ID NO: 43013 - protein, 84 aa, unidentified
  REGION 1..84: note = Description of Unknown:cds_NZ_WFIY01000004.1_cds_WP_155863462.1_1426 target sequence
DKYDKMRFNEIMRKINGITQRILSMRLKELEKAYLIRREIDKNGKTVMYSITTQGKALKNAMLMLLQLTNLLSPPNNPEKDYFC

SEQ ID NO: 43014 - protein, 85 aa, unidentified
  REGION 1..85: note = Description of Unknown:cds_NZ_WFIY01000004.1_cds_WP_155863462.1_1426 target sequence
TLAILLLLDKYDKMRFNEIMRKINGITQRILSMRLKELEKAYLIRREIDKNGKTVMYSITTQGKALKNAMLMLLQLTNLLSPPNN

SEQ ID NO: 43015 - protein, 85 aa, unidentified
  REGION 1..85: note = Description of Unknown:cds_NZ_WFIY01000004.1_cds_WP_155863488.1_1441 target sequence
IICTTVNDSMKFEIFSKAKYLVLMNENGEIIEKRNNPALNSPMKRPAVAKECVELKASTVIAPHGSLCFPSYRILKKAGIKMLIA

SEQ ID NO: 43016 - protein, 84 aa, unidentified
  REGION 1..84: note = Description of Unknown:cds_NZ_WFIY01000004.1_cds_WP_155863488.1_1441 target sequence
NPALNSPMKRPAVAKECVELKASTVIAPHGSLCFPSYRILKKAGIKMLIANPGEDLRSSNLKEVNMKEVIYSSFLAMKERITEH

SEQ ID NO: 43017 - protein, 85 aa, unidentified
  REGION 1..85: note = Description of Unknown:cds_NZ_WFIY01000004.1_cds_WP_155863488.1_1441 target sequence
GEIIEKRNNPALNSPMKRPAVAKECVELKASTVIAPHGSLCFPSYRILKKAGIKMLIANPGEDLRSSNLKEVNMKEVIYSSFLAM

SEQ ID NO: 43018 - protein, 85 aa, unidentified
  REGION 1..85: note = Description of Unknown:cds_NZ_WFIY01000004.1_cds_WP_155863604.1_1509 target sequence
DKFLEFLEASIEEFNKGRYRVSCLLCQVSAELLIRSIFDERGLKQPIVPSHDIRTLLGRLNDENLYEFIKENRKELDVVSNCRKN

SEQ ID NO: 43019 - protein, 84 aa, unidentified
  REGION 1..84: note = Description of Unknown:cds_NZ_WFIY01000004.1_cds_WP_155863604.1_1509 target sequence
SIFDERGLKQPIVPSHDIRTLLGRLNDENLYEFIKENRKELDVVSNCRKNSQYGEVKKEEAEECIKMVKLLFEKLKGNGVINDE

SEQ ID NO: 43020 - protein, 85 aa, unidentified
  REGION 1..85: note = Description of Unknown:cds_NZ_WFIY01000004.1_cds_WP_155863604.1_1509 target sequence
VSAELLIRSIFDERGLKQPIVPSHDIRTLLGRLNDENLYEFIKENRKELDVVSNCRKNSQYGEVKKEEAEECIKMVKLLFEKLKG

SEQ ID NO: 43021 - protein, 85 aa, unidentified
  REGION 1..85: note = Description of Unknown:cds_NZ_WFIY01000004.1_cds_WP_155863711.1_1571 target sequence
KINDLTRIIEDLGFHIGRIENIERGIRIFIKENFYIDIMEENNEWILYYVRKVDCKNLHLIREKIKKRNQEILNKGYITGICFLS

SEQ ID NO: 43022 - protein, 84 aa, unidentified
  REGION 1..84: note = Description of Unknown:cds_NZ_WFIY01000004.1_cds_WP_155863711.1_1571 target sequence
IDIMEENNEWILYYVRKVDCKNLHLIREKIKKRNQEILNKGYITGICFLSNSCNVVVVKKLKNGKDEKLWDEYFNMIKVADLVT

SEQ ID NO: 43023 - protein, 85 aa, unidentified
  REGION 1..85: note = Description of Unknown:cds_NZ_WFIY01000004.1_cds_WP_155863711.1_1571 target sequence
IFIKENFYIDIMEENNEWILYYVRKVDCKNLHLIREKIKKRNQEILNKGYITGICFLSNSCNVVVVKKLKNGKDEKLWDEYFNMI

SEQ ID NO: 43024 - protein, 85 aa, unidentified
  REGION 1..85: note = Description of Unknown:cds_NZ_WFIY01000004.1_cds_WP_155863937.1_1854 target sequence
SEEDKIVEALKKLGATIGNWYEVSERPGRPPFGKEVEYKVGDIMWGKVHLRLNGDLYVHIISKIPFNWKDRVKDLKIKGSIEDAA

SEQ ID NO: 43025 - protein, 84 aa, unidentified
  REGION 1..84: note = Description of Unknown:cds_NZ_WFIY01000004.1_cds_WP_155863937.1_1854 target sequence
VEYKVGDIMWGKVHLRLNGDLYVHIISKIPFNWKDRVKDLKIKGSIEDAAGGLMWIKTTPEYMYSDLEFIKNYLEKIKNESLKK

SEQ ID NO: 43026 - protein, 85 aa, unidentified
  REGION 1..85: note = Description of Unknown:cds_NZ_WFIY01000004.1_cds_WP_155863937.1_1854 target sequence
GRPPFGKEVEYKVGDIMWGKVHLRLNGDLYVHIISKIPFNWKDRVKDLKIKGSIEDAAGGLMWIKTTPEYMYSDLEFIKNYLEKI

SEQ ID NO: 43027 - protein, 85 aa, unidentified
  REGION 1..85: note = Description of Unknown:cds_NZ_WFIY01000004.1_cds_WP_155863965.1_1888 target sequence
EFLEKKFTVKPEHSAVKVSSGAVDVLSTPCLIAFMEDASFTLLQEKLGKGLTSVGYHVDVKHLAPAPIGAEILVRSTILKEEGKR

SEQ ID NO: 43028 - protein, 84 aa, unidentified
  REGION 1..84: note = Description of Unknown:cds_NZ_WFIY01000004.1_cds_WP_155863965.1_1888 target sequence
EDASFTLLQEKLGKGLTSVGYHVDVKHLAPAPIGAEILVRSTILKEEGKRVTFKVEAFYKDKKIAEGIHERVIVNEEEFMKKVE

SEQ ID NO: 43029 - protein, 85 aa, unidentified
  REGION 1..85: note = Description of Unknown:cds_NZ_WFIY01000004.1_cds_WP_155863965.1_1888 target sequence
TPCLIAFMEDASFTLLQEKLGKGLTSVGYHVDVKHLAPAPIGAEILVRSTILKEEGKRVTFKVEAFYKDKKIAEGIHERVIVNEE

SEQ ID NO: 43030 - protein, 85 aa, unidentified
  REGION 1..85: note = Description of Unknown:cds_NZ_WFIY01000004.1_cds_WP_155864109.1_2059 target sequence
LQIENILKFLEEADELLKKGDLIQASEKLYKAEEEAIKFLSYRENISVLSKVKKEDRWKSEFLFDASLQLSNSYPEIKDIWKSAW

SEQ ID NO: 43031 - protein, 84 aa, unidentified
  REGION 1..84: note = Description of Unknown:cds_NZ_WFIY01000004.1_cds_WP_155864109.1_2059 target sequence
IKFLSYRENISVLSKVKKEDRWKSEFLFDASLQLSNSYPEIKDIWKSAWILHVEGFHETRLDENKVKFYADNVKKLRKILEPFF

SEQ ID NO: 43032 - protein, 85 aa, unidentified
  REGION 1..85: note = Description of Unknown:cds_NZ_WFIY01000004.1_cds_WP_155864109.1_2059 target sequence
KLYKAEEEAIKFLSYRENISVLSKVKKEDRWKSEFLFDASLQLSNSYPEIKDIWKSAWILHVEGFHETRLDENKVKFYADNVKKL

SEQ ID NO: 43033 - protein, 85 aa, unidentified
  REGION 1..85: note = Description of Unknown:cds_NZ_WFIY01000004.1_cds_WP_013776508.1_2213 target sequence
DERGIQAIDGLVEQIVESKDALEQFLRLLNALQKTGILPLLVGIVEKLDENLAFLAEQNAMLIRNVNMIYSVLSGKEEINNVSLG

SEQ ID NO: 43034 - protein, 84 aa, unidentified
  REGION 1..84: note = Description of Unknown:cds_NZ_WFIY01000004.1_cds_WP_013776508.1_2213 target sequence
GILPLLVGIVEKLDENLAFLAEQNAMLIRNVNMIYSVLSGKEEINNVSLGELIMELKDPDVKRGLYLVLKILKAIGSANKESKP

SEQ ID NO: 43035 - protein, 85 aa, unidentified
  REGION 1..85: note = Description of Unknown:cds_NZ_WFIY01000004.1_cds_WP_013776508.1_2213 target sequence
LLNALQKTGILPLLVGIVEKLDENLAFLAEQNAMLIRNVNMIYSVLSGKEEINNVSLGELIMELKDPDVKRGLYLVLKILKAIGS

SEQ ID NO: 43036 - protein, 85 aa, unidentified
  REGION 1..85: note = Description of Unknown:cds_NZ_WFIY01000004.1_cds_WP_155864271.1_2263 target sequence
DMNDVIGYALRIGVLISVSLIIIGFILLSITPQFSELMSPNSRFNTSVVKPEEVFRGIRKGNGVDFILLGLMALIATPVVRVVLG

SEQ ID NO: 43037 - protein, 84 aa, unidentified
  REGION 1..84: note = Description of Unknown:cds_NZ_WFIY01000004.1_cds_WP_155864271.1_2263 target sequence
ELMSPNSRFNTSVVKPEEVFRGIRKGNGVDFILLGLMALIATPVVRVVLGVIQFAMQRNIIYVIITLIVLFNLLLAIFILPLII

SEQ ID NO: 43038 - protein, 85 aa, unidentified
  REGION 1..85: note = Description of Unknown:cds_NZ_WFIY01000004.1_cds_WP_155864271.1_2263 target sequence
LSITPQFSELMSPNSRFNTSVVKPEEVFRGIRKGNGVDFILLGLMALIATPVVRVVLGVIQFAMQRNIIYVIITLIVLFNLLLAI

SEQ ID NO: 43039 - protein, 85 aa, unidentified
  REGION 1..85: note = Description of Unknown:cds_NZ_WFIY01000004.1_cds_2314 target sequence
LCTKWKFIQSKNRWIGPKVSEALKETSGYVVVFLEDDDLFERTKLKVIYDIFKQNQNLGFYRHKVKIINENGKEANLPYNLYNSG

SEQ ID NO: 43040 - protein, 84 aa, unidentified
  REGION 1..84: note = Description of Unknown:cds_NZ_WFIY01000004.1_cds_2314 target sequence
DDLFERTKLKVIYDIFKQNQNLGFYRHKVKIINENGKEANLPYNLYNSGKIVIKKSRNIGKQYLLTYTEAVMRPCLPWQSEEKF

SEQ ID NO: 43041 - protein, 85 aa, unidentified
  REGION 1..85: note = Description of Unknown:cds_NZ_WFIY01000004.1_cds_2314 target sequence
GYVVVFLEDDDLFERTKLKVIYDIFKQNQNLGFYRHKVKIINENGKEANLPYNLYNSGKIVIKKSRNIGKQYLLTYTEAVMRPCL

SEQ ID NO: 43042 - protein, 85 aa, unidentified
  REGION 1..85: note = Description of Unknown:cds_NC_029316.1_cds_YP_009230266.1_13 target sequence
LLKIIKFLLKSKKEFEVTYEEGEGEKYEEEDFKKFYSPSIELEIKSENALKHDIIEMLEKNGFYLANGAENIDVYEKEIYERTGK

SEQ ID NO: 43043 - protein, 84 aa, unidentified
  REGION 1..84: note = Description of Unknown:cds_NC_029316.1_cds_YP_009230266.1_13 target sequence
SPSIELEIKSENALKHDIIEMLEKNGFYLANGAENIDVYEKEIYERTGKKRKVAVRLVIEVHYDDDDVYKIVIFVKKLIWSIKS

SEQ ID NO: 43044 - protein, 85 aa, unidentified
  REGION 1..85: note = Description of Unknown:cds_NC_029316.1_cds_YP_009230266.1_13 target sequence
EEEDFKKFYSPSIELEIKSENALKHDIIEMLEKNGFYLANGAENIDVYEKEIYERTGKKRKVAVRLVIEVHYDDDDVYKIVIFVK

SEQ ID NO: 43045 - protein, 85 aa, unidentified
  REGION 1..85: note = Description of Unknown:hvTR_P12977.2 target sequence
DKDRPGPPALDDNMEEEVPSTSVVQEQVSAGDWENVLIELSDSSSEKEAEDAHLEPAQKGTKRKRVDHDAGGSAPARPMLPPQPD

SEQ ID NO: 43046 - protein, 84 aa, unidentified
  REGION 1..84: note = Description of Unknown:hvTR_P12977.2 target sequence
NVLIELSDSSSEKEAEDAHLEPAQKGTKRKRVDHDAGGSAPARPMLPPQPDLPGREAILRRFPLDLRTLLQAIGAAATVSIPMA

SEQ ID NO: 43047 - protein, 85 aa, unidentified
  REGION 1..85: note = Description of Unknown:hvTR_P12977.2 target sequence
VSAGDWENVLIELSDSSSEKEAEDAHLEPAQKGTKRKRVDHDAGGSAPARPMLPPQPDLPGREAILRRFPLDLRTLLQAIGAAAT

SEQ ID NO: 43048 - protein, 85 aa, unidentified
  REGION 1..85: note = Description of Unknown:cds_NZ_WFIY01000004.1_cds_WP_155863072.1_979 target sequence
KMVIMVRNDIKMGKGKIAAQVAHAAVSLVLDILNSNNNIWKSCLKEWINEGQPKIVVKVENLEELLKRAELARQKNLPVSIIQDA

SEQ ID NO: 43049 - protein, 84 aa, unidentified
  REGION 1..84: note = Description of Unknown:cds_NZ_WFIY01000004.1_cds_WP_155863072.1_979 target sequence
SNNNIWKSCLKEWINEGQPKIVVKVENLEELLKRAELARQKNLPVSIIQDAGKTQVEPGTITCAGIGPCEDSLIDSITGDLKLL

SEQ ID NO: 43050 - protein, 85 aa, unidentified
  REGION 1..85: note = Description of Unknown:cds_NZ_WFIY01000004.1_cds_WP_155863072.1_979 target sequence
LVLDILNSNNNIWKSCLKEWINEGQPKIVVKVENLEELLKRAELARQKNLPVSIIQDAGKTQVEPGTITCAGIGPCEDSLIDSIT

SEQ ID NO: 43051 - protein, 85 aa, unidentified
  REGION 1..85: note = Description of Unknown:cds_NZ_WFIY01000004.1_cds_WP_155863768.1_1643 target sequence
IYFDLNTANSLLPWIKEKIKELRQTRLQIEEALVKGEKEALSEGAKKIDKIIKEITSQGIIIRDPDLGILDFPAVINGRPAYLCW

SEQ ID NO: 43052 - protein, 84 aa, unidentified
  REGION 1..84: note = Description of Unknown:cds_NZ_WFIY01000004.1_cds_WP_155863768.1_1643 target sequence
KGEKEALSEGAKKIDKIIKEITSQGIIIRDPDLGILDFPAVINGRPAYLCWKDGEEKISFWHYVEEGFAGRKKITGKEDILSYT

SEQ ID NO: 43053 - protein, 85 aa, unidentified
  REGION 1..85: note = Description of Unknown:cds_NZ_WFIY01000004.1_cds_WP_155863768.1_1643 target sequence
QIEEALVKGEKEALSEGAKKIDKIIKEITSQGIIIRDPDLGILDFPAVINGRPAYLCWKDGEEKISFWHYVEEGFAGRKKITGKE

SEQ ID NO: 43054 - protein, 85 aa, unidentified
  REGION 1..85: note = Description of Unknown:cds_NZ_WFIY01000004.1_cds_WP_155864042.1_1976 target sequence
FYLMAKIFVISTAGKDDINRATMAINFALGARKNAGATVAFMFLGRGVETLLREAANAPQMKKMIEEMINAGIDVSYCGISLKNL

SEQ ID NO: 43055 - protein, 84 aa, unidentified
  REGION 1..84: note = Description of Unknown:cds_NZ_WFIY01000004.1_cds_WP_155864042.1_1976 target sequence
AGATVAFMFLGRGVETLLREAANAPQMKKMIEEMINAGIDVSYCGISLKNLGLNKDLIFDGIREVMGGVETAKRIDEGYAVVSF

SEQ ID NO: 43056 - protein, 85 aa, unidentified
  REGION 1..85: note = Description of Unknown:cds_NZ_WFIY01000004.1_cds_WP_155864042.1_1976 target sequence
ALGARKNAGATVAFMFLGRGVETLLREAANAPQMKKMIEEMINAGIDVSYCGISLKNLGLNKDLIFDGIREVMGGVETAKRIDEG

SEQ ID NO: 43057 - protein, 85 aa, unidentified
  REGION 1..85: note = Description of Unknown:cds_NZ_WFIY01000004.1_cds_WP_155864479.1_2060 target sequence
LSLKTSADIYLEEADELLKKGDLIQASEKLYKAAEEAIRLLSFILKLNLEIVNTKSLTDAVFLISEKLNDSKIPIYWASAISLIT

SEQ ID NO: 43058 - protein, 84 aa, unidentified
  REGION 1..84: note = Description of Unknown:cds_NZ_WFIY01000004.1_cds_WP_155864479.1_2060 target sequence
EEAIRLLSFILKLNLEIVNTKSLTDAVFLISEKLNDSKIPIYWASAISLITVNLSKEVVKDLRNDVEELVKIADREYIKVLGRG

SEQ ID NO: 43059 - protein, 85 aa, unidentified
  REGION 1..85: note = Description of Unknown:cds_NZ_WFIY01000004.1_cds_WP_155864479.1_2060 target sequence
EKLYKAAEEAIRLLSFILKLNLEIVNTKSLTDAVFLISEKLNDSKIPIYWASAISLITVNLSKEVVKDLRNDVEELVKIADREYI

SEQ ID NO: 43060 - protein, 85 aa, unidentified
  REGION 1..85: note = Description of Unknown:cds_NC_009884.1_cds_YP_001496926.1_1 target sequence
VKKVGEEEIKQEENEKEKIVKKLNESDVKSIIEDVLKNKEKYGLEARWLLGMDDNKNDSIEVLLGRVNFIEVERGFIEIVPMTRM

SEQ ID NO: 43061 - protein, 84 aa, unidentified
  REGION 1..84: note = Description of Unknown:cds_NC_009884.1_cds_YP_001496926.1_1 target sequence
LKNKEKYGLEARWLLGMDDNKNDSIEVLLGRVNFIEVERGFIEIVPMTRMVVLLKRVNYYTSNYTSYNDELYVFFYSVGWVKFS

SEQ ID NO: 43062 - protein, 85 aa, unidentified
  REGION 1..85: note = Description of Unknown:cds_NC_009884.1_cds_YP_001496926.1_1 target sequence
VKSIIEDVLKNKEKYGLEARWLLGMDDNKNDSIEVLLGRVNFIEVERGFIEIVPMTRMVVLLKRVNYYTSNYTSYNDELYVFFYS

SEQ ID NO: 43063 - protein, 85 aa, unidentified
  REGION 1..85: note = Description of Unknown:cds_NC_007409.1_cds_YP_319843.1_12 target sequence
GLAPSLATLAIALVFLGISLIFLVPAMVQGLYSIVSGVFSVASSVSNETGCPQSTEVVQLSNQTASISVPSQYAGIYTLYLSFIS

SEQ ID NO: 43064 - protein, 84 aa, unidentified
  REGION 1..84: note = Description of Unknown:cds_NC_007409.1_cds_YP_319843.1_12 target sequence
VSGVFSVASSVSNETGCPQSTEVVQLSNQTASISVPSQYAGIYTLYLSFISFVGSIFTDPIALIMLILVSLIITLFAFYYKNQG

SEQ ID NO: 43065 - protein, 85 aa, unidentified
  REGION 1..85: note = Description of Unknown:cds_NC_007409.1_cds_YP_319843.1_12 target sequence
VQGLYSIVSGVFSVASSVSNETGCPQSTEVVQLSNQTASISVPSQYAGIYTLYLSFISFVGSIFTDPIALIMLILVSLIITLFAF

SEQ ID NO: 43066 - protein, 85 aa, unidentified
  REGION 1..85: note = Description of Unknown:vpeps_2X3G_1 target sequence
GDLKKVLNFHFSYIYTYFITITTNYKYGDTEKIFRKFRSYIYNHDKNSHVFSIKETTKNSNGLHYHILVFTNKKLDYSRVHKHMP

SEQ ID NO: 43067 - protein, 85 aa, unidentified
  REGION 1..85: note = Description of Unknown:vpeps_2X3G_1 target sequence
RKFRSYIYNHDKNSHVFSIKETTKNSNGLHYHILVFTNKKLDYSRVHKHMPSHSDIRIELVPKSISDIKNVYKYMLKTKKDIKMS

SEQ ID NO: 43068 - protein, 85 aa, unidentified
  REGION 1..85: note = Description of Unknown:vpeps_2X3G_1 target sequence
GDTEKIFRKFRSYIYNHDKNSHVFSIKETTKNSNGLHYHILVFTNKKLDYSRVHKHMPSHSDIRIELVPKSISDIKNVYKYMLKT

SEQ ID NO: 43069 - protein, 85 aa, unidentified
  REGION 1..85: note = Description of Unknown:cds_NZ_WFIY01000004.1_cds_WP_155862395.1_132 target sequence
FEDLLKVVNYLNDGKILEAGEYLVELAKNNYTNEDIIKISSEIEKELRELKEESWITQIDSKFRDQIISVLEDNTRCKRELIRVL

SEQ ID NO: 43070 - protein, 84 aa, unidentified
  REGION 1..84: note = Description of Unknown:cds_NZ_WFIY01000004.1_cds_WP_155862395.1_132 target sequence
EDIIKISSEIEKELRELKEESWITQIDSKFRDQIISVLEDNTRCKRELIRVLSLSLLEKLSKGNELILNMIRNPHAESKPHTFI

SEQ ID NO: 43071 - protein, 85 aa, unidentified
  REGION 1..85: note = Description of Unknown:cds_NZ_WFIY01000004.1_cds_WP_155862395.1_132 target sequence
KNNYTNEDIIKISSEIEKELRELKEESWITQIDSKFRDQIISVLEDNTRCKRELIRVLSLSLLEKLSKGNELILNMIRNPHAESK

SEQ ID NO: 43072 - protein, 85 aa, unidentified
  REGION 1..85: note = Description of Unknown:cds_NZ_WFIY01000004.1_cds_WP_155862467.1_220 target sequence
KYTFSCADIGMNCGFEIINAGSEEELLEMLKTHAKMEHGITSIPPELIDKIKKAIRKSGKYSFSCEDIGMNCGFEIIGASSEDEL

SEQ ID NO: 43073 - protein, 84 aa, unidentified
  REGION 1..84: note = Description of Unknown:cds_NZ_WFIY01000004.1_cds_WP_155862467.1_220 target sequence
AKMEHGITSIPPELIDKIKKAIRKSGKYSFSCEDIGMNCGFEIIGASSEDELLQQLSIHARMSHKMNNIPQDTINAIKQKIKVS

SEQ ID NO: 43074 - protein, 85 aa, unidentified
  REGION 1..85: note = Description of Unknown:cds_NZ_WFIY01000004.1_cds_WP_155862467.1_220 target sequence
EMLKTHAKMEHGITSIPPELIDKIKKAIRKSGKYSFSCEDIGMNCGFEIIGASSEDELLQQLSIHARMSHKMNNIPQDTINAIKQ

SEQ ID NO: 43075 - protein, 85 aa, unidentified
  REGION 1..85: note = Description of Unknown:cds_NZ_WFIY01000004.1_cds_WP_155862471.1_226 target sequence
LSPPDFLRHIANKVLTPNTLDPKRLDEVRKLLGEAENKYNFSSYGGNPKKLVDYLLSPDFTELVFIIGIDLTKKLLEEIINDYDI

SEQ ID NO: 43076 - protein, 84 aa, unidentified
  REGION 1..84: note = Description of Unknown:cds_NZ_WFIY01000004.1_cds_WP_155862471.1_226 target sequence
AENKYNFSSYGGNPKKLVDYLLSPDFTELVFIIGIDLTKKLLEEIINDYDIEEVKNTAKKLLDEIDGYKEIENSDAILYNKNRF

SEQ ID NO: 43077 - protein, 85 aa, unidentified
  REGION 1..85: note = Description of Unknown:cds_NZ_WFIY01000004.1_cds_WP_155862471.1_226 target sequence
VRKLLGEAENKYNFSSYGGNPKKLVDYLLSPDFTELVFIIGIDLTKKLLEEIINDYDIEEVKNTAKKLLDEIDGYKEIENSDAIL

SEQ ID NO: 43078 - protein, 85 aa, unidentified
  REGION 1..85: note = Description of Unknown:cds_NZ_WFIY01000004.1_cds_WP_155863029.1_916 target sequence
SQAQQIKISDKIQGVIEKDFDNKVIGRRELSLKLYHIGTGTPSRNEIKKAVSELLNTKEDLIVVRKIFTSYGAGISTARVHVYTN

SEQ ID NO: 43079 - protein, 84 aa, unidentified
  REGION 1..84: note = Description of Unknown:cds_NZ_WFIY01000004.1_cds_WP_155863029.1_916 target sequence
LYHIGTGTPSRNEIKKAVSELLNTKEDLIVVRKIFTSYGAGISTARVHVYTNKETLEKYEPKHLLTRGTSTKKEGEQGGEKGSK

SEQ ID NO: 43080 - protein, 85 aa, unidentified
  REGION 1..85: note = Description of Unknown:cds_NZ_WFIY01000004.1_cds_WP_155863029.1_916 target sequence
RELSLKLYHIGTGTPSRNEIKKAVSELLNTKEDLIVVRKIFTSYGAGISTARVHVYTNKETLEKYEPKHLLTRGTSTKKEGEQGG

SEQ ID NO: 43081 - protein, 85 aa, unidentified
  REGION 1..85: note = Description of Unknown:cds_NZ_WFIY01000004.1_cds_WP_013775384.1_1029 target sequence
KAIHNLSKEARQEIINILLEKRSRKELAEELGITPAAIVKFTKGLTHPSDDTILKALEIASDDEKEKIVNIILNDLVNSVIEVFS

SEQ ID NO: 43082 - protein, 84 aa, unidentified
  REGION 1..84: note = Description of Unknown:cds_NZ_WFIY01000004.1_cds_WP_013775384.1_1029 target sequence
TPAAIVKFTKGLTHPSDDTILKALEIASDDEKEKIVNIILNDLVNSVIEVFSEYPNVTTEKIDELKKILDEIEGRKLLASSGFI

SEQ ID NO: 43083 - protein, 85 aa, unidentified
  REGION 1..85: note = Description of Unknown:cds_NZ_WFIY01000004.1_cds_WP_013775384.1_1029 target sequence
AEELGITPAAIVKFTKGLTHPSDDTILKALEIASDDEKEKIVNIILNDLVNSVIEVFSEYPNVTTEKIDELKKILDEIEGRKLLA

SEQ ID NO: 43084 - protein, 85 aa, unidentified
  REGION 1..85: note = Description of Unknown:cds_NZ_WFIY01000004.1_cds_WP_155863373.1_1346 target sequence
IWFSKLNIERLLALLQKITGWTLLGYLIVHVIFVNRLAHGELTEPEIFKYFLVLIGSIVVFHAMNGIRIILIETGHLIPKHHMEE

SEQ ID NO: 43085 - protein, 84 aa, unidentified
  REGION 1..84: note = Description of Unknown:cds_NZ_WFIY01000004.1_cds_WP_155863373.1_1346 target sequence
VNRLAHGELTEPEIFKYFLVLIGSIVVFHAMNGIRIILIETGHLIPKHHMEEPWIYYKTHRIYIWVTIIITILSFFIGLYMVIR

SEQ ID NO: 43086 - protein, 85 aa, unidentified
  REGION 1..85: note = Description of Unknown:cds_NZ_WFIY01000004.1_cds_WP_155863373.1_1346 target sequence
IVHVIFVNRLAHGELTEPEIFKYFLVLIGSIVVFHAMNGIRIILIETGHLIPKHHMEEPWIYYKTHRIYIWVTIIITILSFFIGL

SEQ ID NO: 43087 - protein, 85 aa, unidentified
  REGION 1..85: note = Description of Unknown:cds_NZ_WFIY01000004.1_cds_WP_155863515.1_1463 target sequence
GYLYYAFNRENITKIENFVKETFKESNEIYEPLDLLDRIEELKNLKDHTIQSDYLLSIIKNTFINEINDDPIIIDITNELFEDLG

SEQ ID NO: 43088 - protein, 84 aa, unidentified
  REGION 1..84: note = Description of Unknown:cds_NZ_WFIY01000004.1_cds_WP_155863515.1_1463 target sequence
DLLDRIEELKNLKDHTIQSDYLLSIIKNTFINEINDDPIIIDITNELFEDLGIYTYKAISDKLLPFAPYDYILKQNHPAIRKKY

SEQ ID NO: 43089 - protein, 85 aa, unidentified
  REGION 1..85: note = Description of Unknown:cds_NZ_WFIY01000004.1_cds_WP_155863515.1_1463 target sequence
EIYEPLDLLDRIEELKNLKDHTIQSDYLLSIIKNTFINEINDDPIIIDITNELFEDLGIYTYKAISDKLLPFAPYDYILKQNHPA

SEQ ID NO: 43090 - protein, 85 aa, unidentified
  REGION 1..85: note = Description of Unknown:cds_NZ_WFIY01000004.1_cds_WP_155864041.1_1975 target sequence
RVAIPVTKGRVDGPGEGEEVLIYEIDGDEVKLVEKYENPALKATAARGAHMLKSALDKGVDAVIVAEIGPPGVRLLKGKAKIFLA

SEQ ID NO: 43091 - protein, 84 aa, unidentified
  REGION 1..84: note = Description of Unknown:cds_NZ_WFIY01000004.1_cds_WP_155864041.1_1975 target sequence
EKYENPALKATAARGAHMLKSALDKGVDAVIVAEIGPPGVRLLKGKAKIFLAEGLTVEEALEKLKKGELQETDKPTHDEHHHGF

SEQ ID NO: 43092 - protein, 85 aa, unidentified
  REGION 1..85: note = Description of Unknown:cds_NZ_WFIY01000004.1_cds_WP_155864041.1_1975 target sequence
DEVKLVEKYENPALKATAARGAHMLKSALDKGVDAVIVAEIGPPGVRLLKGKAKIFLAEGLTVEEALEKLKKGELQETDKPTHDE

SEQ ID NO: 43093 - protein, 85 aa, unidentified
  REGION 1..85: note = Description of Unknown:cds_NZ_WFIY01000004.1_cds_WP_155864110.1_2061 target sequence
VREAYLVLGKNLLRIICNYSECEWFILDQNCSLEILNIKQKGKIRITGNAENLQVMKVLLSFLLSSKDPNEAVCIQKSGRFECIK

SEQ ID NO: 43094 - protein, 84 aa, unidentified
  REGION 1..84: note = Description of Unknown:cds_NZ_WFIY01000004.1_cds_WP_155864110.1_2061 target sequence
ILNIKQKGKIRITGNAENLQVMKVLLSFLLSSKDPNEAVCIQKSGRFECIKGDEGIGIMEGKWSGRIFFNEEELQNFLKNLREE

SEQ ID NO: 43095 - protein, 85 aa, unidentified
  REGION 1..85: note = Description of Unknown:cds_NZ_WFIY01000004.1_cds_WP_155864110.1_2061 target sequence
DQNCSLEILNIKQKGKIRITGNAENLQVMKVLLSFLLSSKDPNEAVCIQKSGRFECIKGDEGIGIMEGKWSGRIFFNEEELQNFL

SEQ ID NO: 43096 - protein, 85 aa, unidentified
  REGION 1..85: note = Description of Unknown:cds_NZ_WFIY01000004.1_cds_2145 target sequence
VGLIYVDGIVKNEKGDSEKVRFLIDSGAYYTVLKKEIWEKLGLKEISKVSLVLADGTTIERGVSEAIIELPPYGERHSPVILGES

SEQ ID NO: 43097 - protein, 84 aa, unidentified
  REGION 1..84: note = Description of Unknown:cds_NZ_WFIY01000004.1_cds_2145 target sequence
KEIWEKLGLKEISKVSLVLADGTTIERGVSEAIIELPPYGERHSPVILGESEDENLLGVVTLEIFGLVLDPLKREIRQGRIIMK

SEQ ID NO: 43098 - protein, 85 aa, unidentified
  REGION 1..85: note = Description of Unknown:cds_NZ_WFIY01000004.1_cds_2145 target sequence
AYYTVLKKEIWEKLGLKEISKVSLVLADGTTIERGVSEAIIELPPYGERHSPVILGESEDENLLGVVTLEIFGLVLDPLKREIRQ

SEQ ID NO: 43099 - protein, 85 aa, unidentified
  REGION 1..85: note = Description of Unknown:cds_NC_035460.1_cds_YP_009407964.1_13 target sequence
LYILKLHPTLESIIISVKKVYDSINMCSRMQTVLSTVLLYYTDFHNYFVPYHTDYKCKEYIDQCIKEINLMKQTKINNITLYNIV

SEQ ID NO: 43100 - protein, 85 aa, unidentified
  REGION 1..85: note = Description of Unknown:cds_NC_035460.1_cds_YP_009407964.1_13 target sequence
SRMQTVLSTVLLYYTDFHNYFVPYHTDYKCKEYIDQCIKEINLMKQTKINNITLYNIVINEYKNIYNQYINTISFNIYQHIITQA

SEQ ID NO: 43101 - protein, 85 aa, unidentified
  REGION 1..85: note = Description of Unknown:cds_NC_003214.2_cds_NP_445691.1_26 target sequence
LYILNSATLPLKPGKEYVIHAKELTIEEAKELLENERFISAVGHEATAKMLTNIFDVEIPMNRIQIFLDDGDKLLSIILKTRLEE

SEQ ID NO: 43102 - protein, 84 aa, unidentified
  REGION 1..84: note = Description of Unknown:cds_NC_003214.2_cds_NP_445691.1_26 target sequence
ENERFISAVGHEATAKMLTNIFDVEIPMNRIQIFLDDGDKLLSIILKTRLEEGKVIKTVEELEQIGYNIWLFEVVTYEHNVKYE

SEQ ID NO: 43103 - protein, 85 aa, unidentified
  REGION 1..85: note = Description of Unknown:cds_NC_003214.2_cds_NP_445691.1_26 target sequence
EAKELLENERFISAVGHEATAKMLTNIFDVEIPMNRIQIFLDDGDKLLSIILKTRLEEGKVIKTVEELEQIGYNIWLFEVVTYEH

SEQ ID NO: 43104 - protein, 85 aa, unidentified
  REGION 1..85: note = Description of Unknown:cds_NC_035464.1_cds_YP_009408147.1_1 target sequence
SSNQSNPKKEVSLEEFFEAVKDEVIPLRMIAGDYVVLEGVHMENLRDGKNGKIVDVVGRIVVTNMGLPEGQKVRFTLGLSNAMEV

SEQ ID NO: 43105 - protein, 84 aa, unidentified
  REGION 1..84: note = Description of Unknown:cds_NC_035464.1_cds_YP_009408147.1_1 target sequence
YVVLEGVHMENLRDGKNGKIVDVVGRIVVTNMGLPEGQKVRFTLGLSNAMEVAHHIKDGIKYTMIKKGEMRIVVNGFSEIPKRL

SEQ ID NO: 43106 - protein, 85 aa, unidentified
  REGION 1..85: note = Description of Unknown:cds_NC_035464.1_cds_YP_009408147.1_1 target sequence
RMIAGDYVVLEGVHMENLRDGKNGKIVDVVGRIVVTNMGLPEGQKVRFTLGLSNAMEVAHHIKDGIKYTMIKKGEMRIVVNGFSE

SEQ ID NO: 43107 - protein, 85 aa, unidentified
  REGION 1..85: note = Description of Unknown:vpeps_2VQC_1 target sequence
HHHHHHAQTLNSYKMAEIMYKILEKKGELTLEDILAQFEISVPSAYNIQRALKAICERHPDECEVQYKNRKTTFKWIKQEQKEEQ

SEQ ID NO: 43108 - protein, 85 aa, unidentified
  REGION 1..85: note = Description of Unknown:vpeps_2VQC_1 target sequence
DILAQFEISVPSAYNIQRALKAICERHPDECEVQYKNRKTTFKWIKQEQKEEQKQEQTQDNIAKIFDAQPANFEQTDQGFIKAKQ

SEQ ID NO: 43109 - protein, 85 aa, unidentified
  REGION 1..85: note = Description of Unknown:vpeps_2VQC_1 target sequence
ELTLEDILAQFEISVPSAYNIQRALKAICERHPDECEVQYKNRKTTFKWIKQEQKEEQKQEQTQDNIAKIFDAQPANFEQTDQGF

SEQ ID NO: 43110 - protein, 85 aa, unidentified
  REGION 1..85: note = Description of Unknown:cds_NZ_WFIY01000004.1_cds_WP_162309150.1_818 target sequence
EDLRLLKKAKISVMQGRIVKIQSKQGFLFTYIFLGKDGSKHKDHIVNENYCDCEFFIFNKIYKDKAFCYHVLALKIALHTEKTIT

SEQ ID NO: 43111 - protein, 84 aa, unidentified
  REGION 1..84: note = Description of Unknown:cds_NZ_WFIY01000004.1_cds_WP_162309150.1_818 target sequence
FLGKDGSKHKDHIVNENYCDCEFFIFNKIYKDKAFCYHVLALKIALHTEKTITIDVELNDFLDIIREIRHDGKSLKLRKLIYTT

SEQ ID NO: 43112 - protein, 85 aa, unidentified
  REGION 1..85: note = Description of Unknown:cds_NZ_WFIY01000004.1_cds_WP_162309150.1_818 target sequence
LFTYIFLGKDGSKHKDHIVNENYCDCEFFIFNKIYKDKAFCYHVLALKIALHTEKTITIDVELNDFLDIIREIRHDGKSLKLRKL

SEQ ID NO: 43113 - protein, 85 aa, unidentified
  REGION 1..85: note = Description of Unknown:cds_NZ_WFIY01000004.1_cds_WP_155863444.1_1415 target sequence
GIIAYTGEIIVKDGRRVNLDNILRALYGLSDTDLKVLKIIETLGKAKIDEISSKMNVNKSTVIKSLKTLHSLGFIQREILRNGNK

SEQ ID NO: 43114 - protein, 84 aa, unidentified
  REGION 1..84: note = Description of Unknown:cds_NZ_WFIY01000004.1_cds_WP_155863444.1_1415 target sequence
DLKVLKIIETLGKAKIDEISSKMNVNKSTVIKSLKTLHSLGFIQREILRNGNKGRPTFIYFINIKIEHKIKEDLESIVSALSKT

SEQ ID NO: 43115 - protein, 85 aa, unidentified
  REGION 1..85: note = Description of Unknown:cds_NZ_WFIY01000004.1_cds_WP_155863444.1_1415 target sequence
GLSDTDLKVLKIIETLGKAKIDEISSKMNVNKSTVIKSLKTLHSLGFIQREILRNGNKGRPTFIYFINIKIEHKIKEDLESIVSA

SEQ ID NO: 43116 - protein, 85 aa, unidentified
  REGION 1..85: note = Description of Unknown:cds_NZ_WFIY01000004.1_cds_WP_155863748.1_1620 target sequence
KIAVTYDKEQNLKPLDEAEIIGVIDEEKKVVEQYENPAYNVSKEATMGIILDLGVDAIIVKNKFLCPGSYMMSYGRLKYIPTEYN

SEQ ID NO: 43117 - protein, 84 aa, unidentified
  REGION 1..84: note = Description of Unknown:cds_NZ_WFIY01000004.1_cds_WP_155863748.1_1620 target sequence
QYENPAYNVSKEATMGIILDLGVDAIIVKNKFLCPGSYMMSYGRLKYIPTEYNTLQEVLNNLEEVKKKIVEELPEEMYAEAYES

SEQ ID NO: 43118 - protein, 85 aa, unidentified
  REGION 1..85: note = Description of Unknown:cds_NZ_WFIY01000004.1_cds_WP_155863748.1_1620 target sequence
KKVVEQYENPAYNVSKEATMGIILDLGVDAIIVKNKFLCPGSYMMSYGRLKYIPTEYNTLQEVLNNLEEVKKKIVEELPEEMYAE

SEQ ID NO: 43119 - protein, 85 aa, unidentified
  REGION 1..85: note = Description of Unknown:cds_NC_029316.1_cds_YP_009230318.1_65 target sequence
VGRQLEKVIRESDVKKLKKSEENRSNDELLKRIKSLEDENEKLKKQIDELQQKLKELELNINQLIYSFCDALNKLKKPAFYLEKP

SEQ ID NO: 43120 - protein, 84 aa, unidentified
  REGION 1..84: note = Description of Unknown:cds_NC_029316.1_cds_YP_009230318.1_65 target sequence
KSLEDENEKLKKQIDELQQKLKELELNINQLIYSFCDALNKLKKPAFYLEKPVNTKLYQIVTINYTDYYVVSLQLCEELKWVKQ

SEQ ID NO: 43121 - protein, 85 aa, unidentified
  REGION 1..85: note = Description of Unknown:cds_NC_029316.1_cds_YP_009230318.1_65 target sequence
ELLKRIKSLEDENEKLKKQIDELQQKLKELELNINQLIYSFCDALNKLKKPAFYLEKPVNTKLYQIVTINYTDYYVVSLQLCEEL

SEQ ID NO: 43122 - protein, 85 aa, unidentified
  REGION 1..85: note = Description of Unknown:cds_NC_007409.1_cds_YP_319837.1_6 target sequence
GVWSVVLYLLNTLIVPFRDERAKFEIERVSAEEAKKIIQMHNSQFVSAIGHSASANALSLLLGVAVPVNRTEVFFNVGDEAIAMA

SEQ ID NO: 43123 - protein, 84 aa, unidentified
  REGION 1..84: note = Description of Unknown:cds_NC_007409.1_cds_YP_319837.1_6 target sequence
EAKKIIQMHNSQFVSAIGHSASANALSLLLGVAVPVNRTEVFFNVGDEAIAMALKKRLAEGQVLRTVQELEAVGFDLYYIKRVQ

SEQ ID NO: 43124 - protein, 85 aa, unidentified
  REGION 1..85: note = Description of Unknown:cds_NC_007409.1_cds_YP_319837.1_6 target sequence
RVSAEEAKKIIQMHNSQFVSAIGHSASANALSLLLGVAVPVNRTEVFFNVGDEAIAMALKKRLAEGQVLRTVQELEAVGFDLYYI

SEQ ID NO: 43125 - protein, 85 aa, unidentified
  REGION 1..85: note = Description of Unknown:cds_NC_024711.1_cds_YP_009052557.1_82 target sequence
KLNKDNLIGVIIGFIVLVIFAICLSSGCTKRITPVPEIRYVPVTDSTAVNELVLTKELLRRTQDSLNAYKSDTTISADYFVAKYK

SEQ ID NO: 43126 - protein, 84 aa, unidentified
  REGION 1..84: note = Description of Unknown:cds_NC_024711.1_cds_YP_009052557.1_82 target sequence
ITPVPEIRYVPVTDSTAVNELVLTKELLRRTQDSLNAYKSDTTISADYFVAKYKLERIRYYNDIAGKGNNIKFLRGWIRRTLDE

SEQ ID NO: 43127 - protein, 85 aa, unidentified
  REGION 1..85: note = Description of Unknown:cds_NC_024711.1_cds_YP_009052557.1_82 target sequence
CTKRITPVPEIRYVPVTDSTAVNELVLTKELLRRTQDSLNAYKSDTTISADYFVAKYKLERIRYYNDIAGKGNNIKFLRGWIRRT

SEQ ID NO: 43128 - protein, 85 aa, unidentified
  REGION 1..85: note = Description of Unknown:cds_NZ_WFIY01000004.1_cds_WP_155862356.1_87 target sequence
LANNICAIVNLLLNTINDPLILLSLPPLGIAGYFLGYRLLENNEIKFFFKNGTLYYKWPYSITLTWTLLYIIRVSLEFFALNSLT

SEQ ID NO: 43129 - protein, 84 aa, unidentified
  REGION 1..84: note = Description of Unknown:cds_NZ_WFIY01000004.1_cds_WP_155862356.1_87 target sequence
YFLGYRLLENNEIKFFFKNGTLYYKWPYSITLTWTLLYIIRVSLEFFALNSLTITIIDLLLAFNTGILISASIVTLREAKKFLY

SEQ ID NO: 43130 - protein, 85 aa, unidentified
  REGION 1..85: note = Description of Unknown:cds_NZ_WFIY01000004.1_cds_WP_155862356.1_87 target sequence
LGIAGYFLGYRLLENNEIKFFFKNGTLYYKWPYSITLTWTLLYIIRVSLEFFALNSLTITIIDLLLAFNTGILISASIVTLREAK

SEQ ID NO: 43131 - protein, 85 aa, unidentified
  REGION 1..85: note = Description of Unknown:cds_NZ_WFIY01000004.1_cds_WP_155862546.1_315 target sequence
SEDEYDPELQNLLARRAEEESRRALEERRKREEYEKQKEALLRVILTPEARQRLNNVKLVKPELAESLENQLIALAQAGRIKIPI

SEQ ID NO: 43132 - protein, 84 aa, unidentified
  REGION 1..84: note = Description of Unknown:cds_NZ_WFIY01000004.1_cds_WP_155862546.1_315 target sequence
EEYEKQKEALLRVILTPEARQRLNNVKLVKPELAESLENQLIALAQAGRIKIPITDDELKEILAQVAEQNKRDYKIQIKERGWK

SEQ ID NO: 43133 - protein, 85 aa, unidentified
  REGION 1..85: note = Description of Unknown:cds_NZ_WFIY01000004.1_cds_WP_155862546.1_315 target sequence
RRKREEYEKQKEALLRVILTPEARQRLNNVKLVKPELAESLENQLIALAQAGRIKIPITDDELKEILAQVAEQNKRDYKIQIKER

SEQ ID NO: 43134 - protein, 85 aa, unidentified
  REGION 1..85: note = Description of Unknown:cds_NZ_WFIY01000004.1_cds_WP_155863036.1_924 target sequence
SQDNSQNEKKVDIKSLVSVIPPASALKNREREPPKEKRVKVRKKPEVDEGTIIISNKLVSQMNIKNEVEISVKGKRLRLKVISQD

SEQ ID NO: 43135 - protein, 84 aa, unidentified
  REGION 1..84: note = Description of Unknown:cds_NZ_WFIY01000004.1_cds_WP_155863036.1_924 target sequence
EPPKEKRVKVRKKPEVDEGTIIISNKLVSQMNIKNEVEISVKGKRLRLKVISQDGLQDIEVWANPSDMLKLGLEDNSTVTLRVV

SEQ ID NO: 43136 - protein, 85 aa, unidentified
  REGION 1..85: note = Description of Unknown:cds_NZ_WFIY01000004.1_cds_WP_155863036.1_924 target sequence
NREREPPKEKRVKVRKKPEVDEGTIIISNKLVSQMNIKNEVEISVKGKRLRLKVISQDGLQDIEVWANPSDMLKLGLEDNSTVTL

SEQ ID NO: 43137 - protein, 85 aa, unidentified
  REGION 1..85: note = Description of Unknown:cds_NZ_WFIY01000004.1_cds_WP_155863797.1_1680 target sequence
VFWEAYRKVEKGTKVSLEEFRSNNELKSEVKEGIIELYKEVLNEARRLIDEPDDEKLFLELFRRNIIDSYLLQELIDIMNIIKNL

SEQ ID NO: 43138 - protein, 84 aa, unidentified
  REGION 1..84: note = Description of Unknown:cds_NZ_WFIY01000004.1_cds_WP_155863797.1_1680 target sequence
GIIELYKEVLNEARRLIDEPDDEKLFLELFRRNIIDSYLLQELIDIMNIIKNLHKTDDDVIYGLLVRIMEDLEELFYSVKKFLN

SEQ ID NO: 43139 - protein, 85 aa, unidentified
  REGION 1..85: note = Description of Unknown:cds_NZ_WFIY01000004.1_cds_WP_155863797.1_1680 target sequence
SEVKEGIIELYKEVLNEARRLIDEPDDEKLFLELFRRNIIDSYLLQELIDIMNIIKNLHKTDDDVIYGLLVRIMEDLEELFYSVK

SEQ ID NO: 43140 - protein, 85 aa, unidentified
  REGION 1..85: note = Description of Unknown:cds_NZ_WFIY01000004.1_cds_WP_155863854.1_1750 target sequence
LNRKVIAPCEVAVRDIIPVIKAILVERLYAQGLSQLQISTLMGISPAEVNYYLKGKRGNEDVKKKLEADEEIMDLVNSVVRRLVN

SEQ ID NO: 43141 - protein, 84 aa, unidentified
  REGION 1..84: note = Description of Unknown:cds_NZ_WFIY01000004.1_cds_WP_155863854.1_1750 target sequence
LSQLQISTLMGISPAEVNYYLKGKRGNEDVKKKLEADEEIMDLVNSVVRRLVNSTNGEVINICPLCSLARKKLNKNDYSCPYDI

SEQ ID NO: 43142 - protein, 85 aa, unidentified
  REGION 1..85: note = Description of Unknown:cds_NZ_WFIY01000004.1_cds_WP_155863854.1_1750 target sequence
LYAQGLSQLQISTLMGISPAEVNYYLKGKRGNEDVKKKLEADEEIMDLVNSVVRRLVNSTNGEVINICPLCSLARKKLNKNDYSC

SEQ ID NO: 43143 - protein, 85 aa, unidentified
  REGION 1..85: note = Description of Unknown:cds_NC_003214.2_cds_NP_445697.1_32 target sequence
GEENIELPEGNNKSETEKYIEDLINSIESELPKHVNYTTGIIVDDERNLLIIKNGKLHVGRDENNAKEIKEYVKDANAGYLINAL

SEQ ID NO: 43144 - protein, 84 aa, unidentified
  REGION 1..84: note = Description of Unknown:cds_NC_003214.2_cds_NP_445697.1_32 target sequence
PKHVNYTTGIIVDDERNLLIIKNGKLHVGRDENNAKEIKEYVKDANAGYLINALYVLKQMLASYKDLWSGKIEREAKKALNEII

SEQ ID NO: 43145 - protein, 85 aa, unidentified
  REGION 1..85: note = Description of Unknown:cds_NC_003214.2_cds_NP_445697.1_32 target sequence
ESELPKHVNYTTGIIVDDERNLLIIKNGKLHVGRDENNAKEIKEYVKDANAGYLINALYVLKQMLASYKDLWSGKIEREAKKALN

SEQ ID NO: 43146 - protein, 85 aa, unidentified
  REGION 1..85: note = Description of Unknown:cds_NC_029316.1_cds_YP_009230323.1_70 target sequence
PLHPEKYARHVLRDLRLFLEGKIDYPDIDLRLAGEEAWTDAFPELRDAIHRIIETIHKFAREYDLDAGGRLDFEAEMELINEIKP

SEQ ID NO: 43147 - protein, 84 aa, unidentified
  REGION 1..84: note = Description of Unknown:cds_NC_029316.1_cds_YP_009230323.1_70 target sequence
LAGEEAWTDAFPELRDAIHRIIETIHKFAREYDLDAGGRLDFEAEMELINEIKPELEIVEKFAMGDAREEEEYEEELEEEQGCC

SEQ ID NO: 43148 - protein, 85 aa, unidentified
  REGION 1..85: note = Description of Unknown:cds_NC_029316.1_cds_YP_009230323.1_70 target sequence
IDLRLAGEEAWTDAFPELRDAIHRIIETIHKFAREYDLDAGGRLDFEAEMELINEIKPELEIVEKFAMGDAREEEEYEEELEEEQ

SEQ ID NO: 43149 - protein, 85 aa, unidentified
  REGION 1..85: note = Description of Unknown:cds_NC_029316.1_cds_YP_009230331.1_78 target sequence
LTIKCFDNGNEIVCIDDESQRLINLTKKSTKFLLPEEIDKLIKQLLDNEIEVNEVESHRYEPRTYYTIYKVRGKKPLYFMEVYDG

SEQ ID NO: 43150 - protein, 84 aa, unidentified
  REGION 1..84: note = Description of Unknown:cds_NC_029316.1_cds_YP_009230331.1_78 target sequence
LLPEEIDKLIKQLLDNEIEVNEVESHRYEPRTYYTIYKVRGKKPLYFMEVYDGSSASYRYYFCRSKNQCLKIMEDLEEDNVMLY

SEQ ID NO: 43151 - protein, 85 aa, unidentified
  REGION 1..85: note = Description of Unknown:cds_NC_029316.1_cds_YP_009230331.1_78 target sequence
KSTKFLLPEEIDKLIKQLLDNEIEVNEVESHRYEPRTYYTIYKVRGKKPLYFMEVYDGSSASYRYYFCRSKNQCLKIMEDLEEDN

SEQ ID NO: 43152 - protein, 85 aa, unidentified
  REGION 1..85: note = Description of Unknown:cds_NC_030656.1_cds_YP_009268830.1_115 target sequence
FVVFLILCYFIIIFNVIVPKISSKLEVERKAYLEFANIKGDGMLCINNYLFTYSFAPIGGVTALIAINKKDNKPFMCSDRSNVTV

SEQ ID NO: 43153 - protein, 84 aa, unidentified
  REGION 1..84: note = Description of Unknown:cds_NC_030656.1_cds_YP_009268830.1_115 target sequence
YLEFANIKGDGMLCINNYLFTYSFAPIGGVTALIAINKKDNKPFMCSDRSNVTVSDFVSCGSDDIKNIYGKECLEAYSKLFFTS

SEQ ID NO: 43154 - protein, 85 aa, unidentified
  REGION 1..85: note = Description of Unknown:cds_NC_030656.1_cds_YP_009268830.1_115 target sequence
ERKAYLEFANIKGDGMLCINNYLFTYSFAPIGGVTALIAINKKDNKPFMCSDRSNVTVSDFVSCGSDDIKNIYGKECLEAYSKLF

SEQ ID NO: 43155 - protein, 85 aa, unidentified
  REGION 1..85: note = Description of Unknown:cds_NC_005830.1_cds_YP_003762.1_37 target sequence
GSYLLNGFSPAMLASGHSVVFFNQIPDVMLCGALTSDELVNAIGHKSTINLINRICQTNLKENRIQVMLQDGDEAFIVVVTERLE

SEQ ID NO: 43156 - protein, 84 aa, unidentified
  REGION 1..84: note = Description of Unknown:cds_NC_005830.1_cds_YP_003762.1_37 target sequence
GALTSDELVNAIGHKSTINLINRICQTNLKENRIQVMLQDGDEAFIVVVTERLEEGKVLSDEEITKMFEDGKIKIYYARVHSVV

SEQ ID NO: 43157 - protein, 85 aa, unidentified
  REGION 1..85: note = Description of Unknown:cds_NC_005830.1_cds_YP_003762.1_37 target sequence
VMLCGALTSDELVNAIGHKSTINLINRICQTNLKENRIQVMLQDGDEAFIVVVTERLEEGKVLSDEEITKMFEDGKIKIYYARVH

SEQ ID NO: 43158 - protein, 85 aa, unidentified
  REGION 1..85: note = Description of Unknown:cds_NC_009884.1_cds_YP_001496975.1_50 target sequence
FQLDFDFKDLSRWDNFYRVYKAIHELSMICKPVVKETHKGYHIYCDIELSPEKIMNLRYYFGDDIWRIMYDEQRMIFAPHLFDVL

SEQ ID NO: 43159 - protein, 84 aa, unidentified
  REGION 1..84: note = Description of Unknown:cds_NC_009884.1_cds_YP_001496975.1_50 target sequence
PVVKETHKGYHIYCDIELSPEKIMNLRYYFGDDIWRIMYDEQRMIFAPHLFDVLYQEKEVFTITPHGIHVDENYHEYDVTDKVL

SEQ ID NO: 43160 - protein, 85 aa, unidentified
  REGION 1..85: note = Description of Unknown:cds_NC_009884.1_cds_YP_001496975.1_50 target sequence
MICKPVVKETHKGYHIYCDIELSPEKIMNLRYYFGDDIWRIMYDEQRMIFAPHLFDVLYQEKEVFTITPHGIHVDENYHEYDVTD

SEQ ID NO: 43161 - protein, 85 aa, unidentified
  REGION 1..85: note = Description of Unknown:cds_NZ_WFIY01000004.1_cds_WP_155862302.1_18 target sequence
VSQQITTQKLLDMATEIAVSGKRERLSSTQINSFLEYAQQSRNVELLSLFIIRQSQRGHFVNTGKLLVKYITQLNDINMAIELLG

SEQ ID NO: 43162 - protein, 84 aa, unidentified
  REGION 1..84: note = Description of Unknown:cds_NZ_WFIY01000004.1_cds_WP_155862302.1_18 target sequence
NSFLEYAQQSRNVELLSLFIIRQSQRGHFVNTGKLLVKYITQLNDINMAIELLGYVKWLNEAIEETRIDFNTKTFQDLLKQLTQ

SEQ ID NO: 43163 - protein, 85 aa, unidentified
  REGION 1..85: note = Description of Unknown:cds_NZ_WFIY01000004.1_cds_WP_155862302.1_18 target sequence
STQINSFLEYAQQSRNVELLSLFIIRQSQRGHFVNTGKLLVKYITQLNDINMAIELLGYVKWLNEAIEETRIDFNTKTFQDLLKQ

SEQ ID NO: 43164 - protein, 85 aa, unidentified
  REGION 1..85: note = Description of Unknown:cds_NZ_WFIY01000004.1_cds_WP_155862526.1_290 target sequence
NPKIEEKIAQMRCENRPVKQIAKKLGVNRDDIEAVIKKWISYTDEYLKELVKNRKVKNTKADPGFILNATASVEELLKNDDVLDY

SEQ ID NO: 43165 - protein, 84 aa, unidentified
  REGION 1..84: note = Description of Unknown:cds_NZ_WFIY01000004.1_cds_WP_155862526.1_290 target sequence
DIEAVIKKWISYTDEYLKELVKNRKVKNTKADPGFILNATASVEELLKNDDVLDYIALHMSDHHDRLMDCIRYKVYIYLKQKGK

SEQ ID NO: 43166 - protein, 85 aa, unidentified
  REGION 1..85: note = Description of Unknown:cds_NZ_WFIY01000004.1_cds_WP_155862526.1_290 target sequence
NRDDIEAVIKKWISYTDEYLKELVKNRKVKNTKADPGFILNATASVEELLKNDDVLDYIALHMSDHHDRLMDCIRYKVYIYLKQK

SEQ ID NO: 43167 - protein, 85 aa, unidentified
  REGION 1..85: note = Description of Unknown:cds_NZ_WFIY01000004.1_cds_WP_048054592.1_628 target sequence
SIEISEKSIILRRFLMVAYGLSEADVDAFMKIVNSKEGKDVDAISSELGISKSRASLILKKLADAGLIEKQKSNGSKGGRPKYMY

SEQ ID NO: 43168 - protein, 84 aa, unidentified
  REGION 1..84: note = Description of Unknown:cds_NZ_WFIY01000004.1_cds_WP_048054592.1_628 target sequence
KIVNSKEGKDVDAISSELGISKSRASLILKKLADAGLIEKQKSNGSKGGRPKYMYFVNKNEVIEKLVKRAEDVCKDLSEIIRGL

SEQ ID NO: 43169 - protein, 85 aa, unidentified
  REGION 1..85: note = Description of Unknown:cds_NZ_WFIY01000004.1_cds_WP_048054592.1_628 target sequence
AFMKIVNSKEGKDVDAISSELGISKSRASLILKKLADAGLIEKQKSNGSKGGRPKYMYFVNKNEVIEKLVKRAEDVCKDLSEIIR

SEQ ID NO: 43170 - protein, 85 aa, unidentified
  REGION 1..85: note = Description of Unknown:cds_NZ_WFIY01000004.1_cds_WP_013775463.1_950 target sequence
TGSTNIMIRKLIRSLEKQKKPLWKTVAEKLQTPSRKRWYINLYKIEKYTKPGDIVIVPGKVLGIGNLTHEVTVVALDFSKSAKEK

SEQ ID NO: 43171 - protein, 84 aa, unidentified
  REGION 1..84: note = Description of Unknown:cds_NZ_WFIY01000004.1_cds_WP_013775463.1_950 target sequence
QTPSRKRWYINLYKIEKYTKPGDIVIVPGKVLGIGNLTHEVTVVALDFSKSAKEKILKAGGKVMSLYDFDKLDLKGKNVRLMKQ

SEQ ID NO: 43172 - protein, 85 aa, unidentified
  REGION 1..85: note = Description of Unknown:cds_NZ_WFIY01000004.1_cds_WP_013775463.1_950 target sequence
EKLQTPSRKRWYINLYKIEKYTKPGDIVIVPGKVLGIGNLTHEVTVVALDFSKSAKEKILKAGGKVMSLYDFDKLDLKGKNVRLM

SEQ ID NO: 43173 - protein, 85 aa, unidentified
  REGION 1..85: note = Description of Unknown:cds_NZ_WFIY01000004.1_cds_WP_155863147.1_1075 target sequence
TDDSIKKAAELLRQGATMLSEACPVCGSPLFRLKTGDVICPVHGKVYIVKSDEEEKKVKKDIMLSSVEDFLVEGLYSTAKKIKED

SEQ ID NO: 43174 - protein, 84 aa, unidentified
  REGION 1..84: note = Description of Unknown:cds_NZ_WFIY01000004.1_cds_WP_155863147.1_1075 target sequence
FRLKTGDVICPVHGKVYIVKSDEEEKKVKKDIMLSSVEDFLVEGLYSTAKKIKEDPYDSETLVQIIRYLDAIERIRKLVPQHNS

SEQ ID NO: 43175 - protein, 85 aa, unidentified
  REGION 1..85: note = Description of Unknown:cds_NZ_WFIY01000004.1_cds_WP_155863147.1_1075 target sequence
SPLFRLKTGDVICPVHGKVYIVKSDEEEKKVKKDIMLSSVEDFLVEGLYSTAKKIKEDPYDSETLVQIIRYLDAIERIRKLVPQH

SEQ ID NO: 43176 - protein, 85 aa, unidentified
  REGION 1..85: note = Description of Unknown:cds_NC_035464.1_cds_YP_009408148.1_2 target sequence
GLARSPRDSRDAEVYLVRPLKGVFSLQDHAFLVTVRGVFPRKGEFTRKSHWGLMVDVDVDGLSLRFRSKLYFTWQVEMGGRPWAF

SEQ ID NO: 43177 - protein, 84 aa, unidentified
  REGION 1..84: note = Description of Unknown:cds_NC_035464.1_cds_YP_009408148.1_2 target sequence
FLVTVRGVFPRKGEFTRKSHWGLMVDVDVDGLSLRFRSKLYFTWQVEMGGRPWAFVPVYGCADIIQEYGYQRGVAICQKLKLSR

SEQ ID NO: 43178 - protein, 85 aa, unidentified
  REGION 1..85: note = Description of Unknown:cds_NC_035464.1_cds_YP_009408148.1_2 target sequence
DHAFLVTVRGVFPRKGEFTRKSHWGLMVDVDVDGLSLRFRSKLYFTWQVEMGGRPWAFVPVYGCADIIQEYGYQRGVAICQKLKL

SEQ ID NO: 43179 - protein, 85 aa, unidentified
  REGION 1..85: note = Description of Unknown:cds_NC_005830.1_cds_YP_003738.1_13 target sequence
GKEKVEEKKENKSGVKEKIQNWIADAKKRGTWQTLLLKQIGNTRLNVAVTPDGSALLKIFINRPQNGIIFSLNELEDIKKAIEIA

SEQ ID NO: 43180 - protein, 84 aa, unidentified
  REGION 1..84: note = Description of Unknown:cds_NC_005830.1_cds_YP_003738.1_13 target sequence
TWQTLLLKQIGNTRLNVAVTPDGSALLKIFINRPQNGIIFSLNELEDIKKAIEIAESIKSELESIPEFKNAKVSLKTQKGVLDE

SEQ ID NO: 43181 - protein, 85 aa, unidentified
  REGION 1..85: note = Description of Unknown:cds_NC_005830.1_cds_YP_003738.1_13 target sequence
KRGTWQTLLLKQIGNTRLNVAVTPDGSALLKIFINRPQNGIIFSLNELEDIKKAIEIAESIKSELESIPEFKNAKVSLKTQKGVL

SEQ ID NO: 43182 - protein, 85 aa, unidentified
  REGION 1..85: note = Description of Unknown:cds_NC_009884.1_cds_YP_001496952.1_27 target sequence
SVANEVTQLTPTYAPAENASEPTVFSVPIVAFPKAYEYDQQWAVGLIVAGMMKQAKYRRYAYPFVETFVQLKEPYRQYKYRNALK

SEQ ID NO: 43183 - protein, 84 aa, unidentified
  REGION 1..84: note = Description of Unknown:cds_NC_009884.1_cds_YP_001496952.1_27 target sequence
AFPKAYEYDQQWAVGLIVAGMMKQAKYRRYAYPFVETFVQLKEPYRQYKYRNALKGANAWLTWFNKFEVPALHRLGRMNINKTK

SEQ ID NO: 43184 - protein, 85 aa, unidentified
  REGION 1..85: note = Description of Unknown:cds_NC_009884.1_cds_YP_001496952.1_27 target sequence
PIVAFPKAYEYDQQWAVGLIVAGMMKQAKYRRYAYPFVETFVQLKEPYRQYKYRNALKGANAWLTWFNKFEVPALHRLGRMNINK

SEQ ID NO: 43185 - protein, 85 aa, unidentified
  REGION 1..85: note = Description of Unknown:cds_NC_007409.1_cds_YP_319853.1_22 target sequence
ETKLVQSIVIKTEAKVSTVKYRKKVNGERREYKLYFVRFSKDASIKLEKMGVRKLKNVEIIYEDEKYVLGSMSVRIWSRTSNDNT

SEQ ID NO: 43186 - protein, 84 aa, unidentified
  REGION 1..84: note = Description of Unknown:cds_NC_007409.1_cds_YP_319853.1_22 target sequence
EYKLYFVRFSKDASIKLEKMGVRKLKNVEIIYEDEKYVLGSMSVRIWSRTSNDNTALYGLTLPKPIGEKLAGKKVLVLAEIESK

SEQ ID NO: 43187 - protein, 85 aa, unidentified
  REGION 1..85: note = Description of Unknown:cds_NC_007409.1_cds_YP_319853.1_22 target sequence
ERREYKLYFVRFSKDASIKLEKMGVRKLKNVEIIYEDEKYVLGSMSVRIWSRTSNDNTALYGLTLPKPIGEKLAGKKVLVLAEIE

SEQ ID NO: 43188 - protein, 85 aa, unidentified
  REGION 1..85: note = Description of Unknown:hvTR_P27556 target sequence
RGNSVDLQEIVLVQQGEVPENAAVHSGEHSDDEGESEEEEREQVQQVPTPRRTLYLVESQCPFCQAIIRFVCVASNTGIRNLQAL

SEQ ID NO: 43189 - protein, 84 aa, unidentified
  REGION 1..84: note = Description of Unknown:hvTR_P27556 target sequence
SDDEGESEEEEREQVQQVPTPRRTLYLVESQCPFCQAIIRFVCVASNTGIRNLQALLVNSHLDLACHACVEQNGVQGLRHRQWQ

SEQ ID NO: 43190 - protein, 85 aa, unidentified
  REGION 1..85: note = Description of Unknown:hvTR_P27556 target sequence
EHSDDEGESEEEEREQVQQVPTPRRTLYLVESQCPFCQAIIRFVCVASNTGIRNLQALLVNSHLDLACHACVEQNGVQGLRHRQW

SEQ ID NO: 43191 - protein, 85 aa, unidentified
  REGION 1..85: note = Description of Unknown:cds_NZ_WFIY01000004.1_cds_WP_155862407.1_146 target sequence
KVPKDLKALQRMGIKAEKIDALRVTIETPDEIITIESPMVMRTSFAGQEAIVVSGGETKVEKKGAQQKVEIKDEDVKFIMEQTGK

SEQ ID NO: 43192 - protein, 84 aa, unidentified
  REGION 1..84: note = Description of Unknown:cds_NZ_WFIY01000004.1_cds_WP_155862407.1_146 target sequence
DEIITIESPMVMRTSFAGQEAIVVSGGETKVEKKGAQQKVEIKDEDVKFIMEQTGKPENEVREALVKANGDIAKAIMILNGQES

SEQ ID NO: 43193 - protein, 85 aa, unidentified
  REGION 1..85: note = Description of Unknown:cds_NZ_WFIY01000004.1_cds_WP_155862407.1_146 target sequence
TPDEIITIESPMVMRTSFAGQEAIVVSGGETKVEKKGAQQKVEIKDEDVKFIMEQTGKPENEVREALVKANGDIAKAIMILNGQE

SEQ ID NO: 43194 - protein, 85 aa, unidentified
  REGION 1..85: note = Description of Unknown:cds_NZ_WFIY01000004.1_cds_WP_155862518.1_279 target sequence
PAFRDLYDLVKKMMEEEEKEFKKMKEEIEKEFNEPLYTYYETDKEIYYIVDVPHLESQTLYIKMENNKLELSCKDKYGKCYHLEL

SEQ ID NO: 43195 - protein, 84 aa, unidentified
  REGION 1..84: note = Description of Unknown:cds_NZ_WFIY01000004.1_cds_WP_155862518.1_279 target sequence
KEFNEPLYTYYETDKEIYYIVDVPHLESQTLYIKMENNKLELSCKDKYGKCYHLELPVNNVEKYDVDVVRNKGFVKIVLKKKST

SEQ ID NO: 43196 - protein, 85 aa, unidentified
  REGION 1..85: note = Description of Unknown:cds_NZ_WFIY01000004.1_cds_WP_155862518.1_279 target sequence
IEKEFNEPLYTYYETDKEIYYIVDVPHLESQTLYIKMENNKLELSCKDKYGKCYHLELPVNNVEKYDVDVVRNKGFVKIVLKKKS

SEQ ID NO: 43197 - protein, 85 aa, unidentified
  REGION 1..85: note = Description of Unknown:cds_NZ_WFIY01000004.1_cds_WP_155862665.1_459 target sequence
KISEVPNLYLLDLKNMQIIIEELKTEKGEKIYSIYQNRKYSINEEKEWTPDVDKAKKIKEEELPVEVAKYLNKLGIYVKVPKVVE

SEQ ID NO: 43198 - protein, 84 aa, unidentified
  REGION 1..84: note = Description of Unknown:cds_NZ_WFIY01000004.1_cds_WP_155862665.1_459 target sequence
KIYSIYQNRKYSINEEKEWTPDVDKAKKIKEEELPVEVAKYLNKLGIYVKVPKVVEKKEQQKVETKEEKKQEGEAKKKEEQQQQ

SEQ ID NO: 43199 - protein, 85 aa, unidentified
  REGION 1..85: note = Description of Unknown:cds_NZ_WFIY01000004.1_cds_WP_155862665.1_459 target sequence
GEKIYSIYQNRKYSINEEKEWTPDVDKAKKIKEEELPVEVAKYLNKLGIYVKVPKVVEKKEQQKVETKEEKKQEGEAKKKEEQQQ

SEQ ID NO: 43200 - protein, 85 aa, unidentified
  REGION 1..85: note = Description of Unknown:cds_NZ_WFIY01000004.1_cds_WP_083810679.1_825 target sequence
TKIFKITRKVLIVLYIKTNGSLKLISNPQSKNVSAIILINTDAGGEEEVYEKLKELKEVSEAYIVYGVYDIVAKIEAQDMDSLRN

SEQ ID NO: 43201 - protein, 84 aa, unidentified
  REGION 1..84: note = Description of Unknown:cds_NZ_WFIY01000004.1_cds_WP_083810679.1_825 target sequence
SKNVSAIILINTDAGGEEEVYEKLKELKEVSEAYIVYGVYDIVAKIEAQDMDSLRNFVSSTIRKLPKVRSTLTMIIMESSTMKK

SEQ ID NO: 43202 - protein, 85 aa, unidentified
  REGION 1..85: note = Description of Unknown:cds_NZ_WFIY01000004.1_cds_WP_083810679.1_825 target sequence
PQSKNVSAIILINTDAGGEEEVYEKLKELKEVSEAYIVYGVYDIVAKIEAQDMDSLRNFVSSTIRKLPKVRSTLTMIIMESSTMK

SEQ ID NO: 43203 - protein, 85 aa, unidentified
  REGION 1..85: note = Description of Unknown:cds_NZ_WFIY01000004.1_cds_WP_155863534.1_1474 target sequence
AKNIVVMINSGKDQKAKILTGLTLALVGKQKHLFDDVQVIFFGPSEQLIAEKDPDIMNMLEQLIKVENVYACQLVGDNMKITDKL

SEQ ID NO: 43204 - protein, 84 aa, unidentified
  REGION 1..84: note = Description of Unknown:cds_NZ_WFIY01000004.1_cds_WP_155863534.1_1474 target sequence
QKHLFDDVQVIFFGPSEQLIAEKDPDIMNMLEQLIKVENVYACQLVGDNMKITDKLKEVKGLNVTLVGPVIADFVAKGYEILNF

SEQ ID NO: 43205 - protein, 85 aa, unidentified
  REGION 1..85: note = Description of Unknown:cds_NZ_WFIY01000004.1_cds_WP_155863534.1_1474 target sequence
GKQKHLFDDVQVIFFGPSEQLIAEKDPDIMNMLEQLIKVENVYACQLVGDNMKITDKLKEVKGLNVTLVGPVIADFVAKGYEILN

SEQ ID NO: 43206 - protein, 85 aa, unidentified
  REGION 1..85: note = Description of Unknown:cds_NC_035460.1_cds_YP_009408068.1_117 target sequence
ISLFLILCYFILIFNIIIPAISEKMRREREAYINFKKINSKYICVDNTLFTYTYDRGGIHAHIVLDKTTKKPLPCNKILTADNNI

SEQ ID NO: 43207 - protein, 84 aa, unidentified
  REGION 1..84: note = Description of Unknown:cds_NC_035460.1_cds_YP_009408068.1_117 target sequence
EAYINFKKINSKYICVDNTLFTYTYDRGGIHAHIVLDKTTKKPLPCNKILTADNNILFSCDKTDDIFSFNQSCFKAYTDLFFTT

SEQ ID NO: 43208 - protein, 85 aa, unidentified
  REGION 1..85: note = Description of Unknown:cds_NC_035460.1_cds_YP_009408068.1_117 target sequence
EREAYINFKKINSKYICVDNTLFTYTYDRGGIHAHIVLDKTTKKPLPCNKILTADNNILFSCDKTDDIFSFNQSCFKAYTDLFFT

SEQ ID NO: 43209 - protein, 85 aa, unidentified
  REGION 1..85: note = Description of Unknown:cds_NC_035460.1_cds_YP_009408075.1_124 target sequence
ATKPPMTMFPGDDEDEDLLLTNIDFVSAEKTITKKASDKDEKVSDENNKKRLDKLEKRITDVINNFDELEKCCKRNSEVLSRLEE

SEQ ID NO: 43210 - protein, 84 aa, unidentified
  REGION 1..84: note = Description of Unknown:cds_NC_035460.1_cds_YP_009408075.1_124 target sequence
KTITKKASDKDEKVSDENNKKRLDKLEKRITDVINNFDELEKCCKRNSEVLSRLEEHAETLRKTMVALAIKIDLQTGRRSSLKP

SEQ ID NO: 43211 - protein, 85 aa, unidentified
  REGION 1..85: note = Description of Unknown:cds_NC_035460.1_cds_YP_009408075.1_124 target sequence
AEKTITKKASDKDEKVSDENNKKRLDKLEKRITDVINNFDELEKCCKRNSEVLSRLEEHAETLRKTMVALAIKIDLQTGRRSSLK

SEQ ID NO: 43212 - protein, 85 aa, unidentified
  REGION 1..85: note = Description of Unknown:cds_NC_010495.1_cds_YP_001742087.1_50 target sequence
TITKQRVEKIIYRHEMGLNSDVTAEEVYDLAVLALNLSNIAKLKRYELDMDGCDSFGQDCGADMTEDPEGEFVMFEDVVSLVQFD

SEQ ID NO: 43213 - protein, 84 aa, unidentified
  REGION 1..84: note = Description of Unknown:cds_NC_010495.1_cds_YP_001742087.1_50 target sequence
LAVLALNLSNIAKLKRYELDMDGCDSFGQDCGADMTEDPEGEFVMFEDVVSLVQFDTTAQQFESLSNHKHNFINGTCVQCLKSE

SEQ ID NO: 43214 - protein, 85 aa, unidentified
  REGION 1..85: note = Description of Unknown:cds_NC_010495.1_cds_YP_001742087.1_50 target sequence
YDLAVLALNLSNIAKLKRYELDMDGCDSFGQDCGADMTEDPEGEFVMFEDVVSLVQFDTTAQQFESLSNHKHNFINGTCVQCLKS

SEQ ID NO: 43215 - protein, 85 aa, unidentified
  REGION 1..85: note = Description of Unknown:vpeps_2X4I_1 target sequence
NKVYLANAFSINMLTKFPTKVVIDKIDRLEFCENIDNEDIINSIGHDSTIQLINSLCGTTFQKNRVEIKLEKEDKLYVVQISQRL

SEQ ID NO: 43216 - protein, 85 aa, unidentified
  REGION 1..85: note = Description of Unknown:vpeps_2X4I_1 target sequence
LEFCENIDNEDIINSIGHDSTIQLINSLCGTTFQKNRVEIKLEKEDKLYVVQISQRLEEGKILTLEEILKLYESGKVQFFEIIVD

SEQ ID NO: 43217 - protein, 85 aa, unidentified
  REGION 1..85: note = Description of Unknown:vpeps_2X4I_1 target sequence
RLEFCENIDNEDIINSIGHDSTIQLINSLCGTTFQKNRVEIKLEKEDKLYVVQISQRLEEGKILTLEEILKLYESGKVQFFEIIV

SEQ ID NO: 43218 - protein, 85 aa, unidentified
  REGION 1..85: note = Description of Unknown:vpeps_3GWN_1 target sequence
ANGLITKIWGTAGWTFNHAVTFGYPLNPTSDDKRRYKNYFISLGDVLPCRLCRESYKKFITTGKTALTNEVLRNRHTLTKWFYDV

SEQ ID NO: 43219 - protein, 85 aa, unidentified
  REGION 1..85: note = Description of Unknown:vpeps_3GWN_1 target sequence
SDDKRRYKNYFISLGDVLPCRLCRESYKKFITTGKTALTNEVLRNRHTLTKWFYDVHNAVNNKLEVDYGLSYEDVVNKYESFRAK

SEQ ID NO: 43220 - protein, 85 aa, unidentified
  REGION 1..85: note = Description of Unknown:vpeps_3GWN_1 target sequence
PTSDDKRRYKNYFISLGDVLPCRLCRESYKKFITTGKTALTNEVLRNRHTLTKWFYDVHNAVNNKLEVDYGLSYEDVVNKYESFR

SEQ ID NO: 43221 - protein, 85 aa, unidentified
  REGION 1..85: note = Description of Unknown:cds_NC_038931.1_cds_YP_009509123.1_7 target sequence
IIIKTKNREYTIDENKEINSISAADTICPYRAYRSYHRKIPIKIDDCKEARKIAGSMTHYVILRQLKEQGCETEKIVDPELKFRA

SEQ ID NO: 43222 - protein, 84 aa, unidentified
  REGION 1..84: note = Description of Unknown:cds_NC_038931.1_cds_YP_009509123.1_7 target sequence
PYRAYRSYHRKIPIKIDDCKEARKIAGSMTHYVILRQLKEQGCETEKIVDPELKFRADAICDGDALLRLRQTSIGTGMRLISGN

SEQ ID NO: 43223 - protein, 85 aa, unidentified
  REGION 1..85: note = Description of Unknown:cds_NC_038931.1_cds_YP_009509123.1_7 target sequence
CPYRAYRSYHRKIPIKIDDCKEARKIAGSMTHYVILRQLKEQGCETEKIVDPELKFRADAICDGDALLRLRQTSIGTGMRLISGN

SEQ ID NO: 43224 - protein, 85 aa, unidentified
  REGION 1..85: note = Description of Unknown:cds_NC_024711.1_cds_YP_009052503.1_22 target sequence
RPITEEDEQNLDKWEYLNIDNKRIDKKDIYCYGEINLSSNDDVEYIKKFSLLDTDNGGTVHSNFNYQEGYALVEGIAKTYPTFDI

SEQ ID NO: 43225 - protein, 84 aa, unidentified
  REGION 1..84: note = Description of Unknown:cds_NC_024711.1_cds_YP_009052503.1_22 target sequence
IYCYGEINLSSNDDVEYIKKFSLLDTDNGGTVHSNFNYQEGYALVEGIAKTYPTFDIIEWFKYNHCLIGKPARIIIYKCKKENL

SEQ ID NO: 43226 - protein, 85 aa, unidentified
  REGION 1..85: note = Description of Unknown:cds_NC_024711.1_cds_YP_009052503.1_22 target sequence
DIYCYGEINLSSNDDVEYIKKFSLLDTDNGGTVHSNFNYQEGYALVEGIAKTYPTFDIIEWFKYNHCLIGKPARIIIYKCKKENL

SEQ ID NO: 43227 - protein, 85 aa, unidentified
  REGION 1..85: note = Description of Unknown:cds_NC_024711.1_cds_YP_009443003.1_56 target sequence
RVIKTKHFPFNGYKAINLFGIIFTKGELSNKELNHEAIHTEQMKEMLYIFFYIWYGVEYLIIRLFHIKQHDAYKDVSFEEEAHIN

SEQ ID NO: 43228 - protein, 84 aa, unidentified
  REGION 1..84: note = Description of Unknown:cds_NC_024711.1_cds_YP_009443003.1_56 target sequence
SNKELNHEAIHTEQMKEMLYIFFYIWYGVEYLIIRLFHIKQHDAYKDVSFEEEAHINDDNLNYISERKHYTWTKYLGINSSKTA

SEQ ID NO: 43229 - protein, 85 aa, unidentified
  REGION 1..85: note = Description of Unknown:cds_NC_024711.1_cds_YP_009443003.1_56 target sequence
LSNKELNHEAIHTEQMKEMLYIFFYIWYGVEYLIIRLFHIKQHDAYKDVSFEEEAHINDDNLNYISERKHYTWTKYLGINSSKTA

SEQ ID NO: 43230 - protein, 85 aa, unidentified
  REGION 1..85: note = Description of Unknown:cds_NZ_WFIY01000004.1_cds_WP_155862475.1_230 target sequence
LSSNKSVKMTEDEIDKALAKAEKEAEKRDHKKIWIDKMLKSAKTYYKLCPYYDKKTSNCFLMLSSNDSNKKCNREGRYDNCPVFL

SEQ ID NO: 43231 - protein, 84 aa, unidentified
  REGION 1..84: note = Description of Unknown:cds_NZ_WFIY01000004.1_cds_WP_155862475.1_230 target sequence
HKKIWIDKMLKSAKTYYKLCPYYDKKTSNCFLMLSSNDSNKKCNREGRYDNCPVFLAFLDNKYQEYTSKKKILPLDFLDLAQSV

SEQ ID NO: 43232 - protein, 85 aa, unidentified
  REGION 1..85: note = Description of Unknown:cds_NZ_WFIY01000004.1_cds_WP_155862475.1_230 target sequence
RDHKKIWIDKMLKSAKTYYKLCPYYDKKTSNCFLMLSSNDSNKKCNREGRYDNCPVFLAFLDNKYQEYTSKKKILPLDFLDLAQS

SEQ ID NO: 43233 - protein, 85 aa, unidentified
  REGION 1..85: note = Description of Unknown:cds_NZ_WFIY01000004.1_cds_WP_155862936.1_789 target sequence
LSSVIIEEEHYIPYSVAKKYVYELIRNGNNSSILQRTYEYLNSITKCNDEDAAKLMEELAQLVEKEEIRAVIASICPTTVDEVRS

SEQ ID NO: 43234 - protein, 84 aa, unidentified
  REGION 1..84: note = Description of Unknown:cds_NZ_WFIY01000004.1_cds_WP_155862936.1_789 target sequence
NSSILQRTYEYLNSITKCNDEDAAKLMEELAQLVEKEEIRAVIASICPTTVDEVRSILASDSKNYGQEILEKIVELVKKYLQKG

SEQ ID NO: 43235 - protein, 85 aa, unidentified
  REGION 1..85: note = Description of Unknown:cds_NZ_WFIY01000004.1_cds_WP_155862936.1_789 target sequence
GNNSSILQRTYEYLNSITKCNDEDAAKLMEELAQLVEKEEIRAVIASICPTTVDEVRSILASDSKNYGQEILEKIVELVKKYLQK

SEQ ID NO: 43236 - protein, 85 aa, unidentified
  REGION 1..85: note = Description of Unknown:cds_NZ_WFIY01000004.1_cds_WP_155863364.1_1336 target sequence
TKMLTQQKIVVKKDEIPPMSMVEYYFPAQKPWERKPVLVINYKGSFFAIEAFCSHAGLSLEDGFLTDDGRVVCPWHGSVFDIKTG

SEQ ID NO: 43237 - protein, 84 aa, unidentified
  REGION 1..84: note = Description of Unknown:cds_NZ_WFIY01000004.1_cds_WP_155863364.1_1336 target sequence
QKPWERKPVLVINYKGSFFAIEAFCSHAGLSLEDGFLTDDGRVVCPWHGSVFDIKTGKVVDGPAKRDLKTYHVEVKGDEVIIYE

SEQ ID NO: 43238 - protein, 85 aa, unidentified
  REGION 1..85: note = Description of Unknown:cds_NZ_WFIY01000004.1_cds_WP_155863364.1_1336 target sequence
AQKPWERKPVLVINYKGSFFAIEAFCSHAGLSLEDGFLTDDGRVVCPWHGSVFDIKTGKVVDGPAKRDLKTYHVEVKGDEVIIYE

SEQ ID NO: 43239 - protein, 85 aa, unidentified
  REGION 1..85: note = Description of Unknown:cds_NZ_WFIY01000004.1_cds_WP_155863370.1_1342 target sequence
MGNISDTLVLVLVAILLLSGQKDVADTVRNLGKTIEEFRRKQNEFKTELLRELNETNEIPKSIAREISSEDYYNRYLKKPTQASN

SEQ ID NO: 43240 - protein, 84 aa, unidentified
  REGION 1..84: note = Description of Unknown:cds_NZ_WFIY01000004.1_cds_WP_155863370.1_1342 target sequence
RNLGKTIEEFRRKQNEFKTELLRELNETNEIPKSIAREISSEDYYNRYLKKPTQASNEKIRELEEQIAKLRLELERMKKGDGKN

SEQ ID NO: 43241 - protein, 85 aa, unidentified
  REGION 1..85: note = Description of Unknown:cds_NZ_WFIY01000004.1_cds_WP_155863370.1_1342 target sequence
VRNLGKTIEEFRRKQNEFKTELLRELNETNEIPKSIAREISSEDYYNRYLKKPTQASNEKIRELEEQIAKLRLELERMKKGDGKN

SEQ ID NO: 43242 - protein, 85 aa, unidentified
  REGION 1..85: note = Description of Unknown:cds_NZ_WFIY01000004.1_cds_1448 target sequence
SWVKFRFSHLRRWREYAEKIARAVHDIEPSAEVYIIGGVAEDRITVLSDIDILIVIKRKLSGKERKELSKKVLIRAMDFYSLPFD

SEQ ID NO: 43243 - protein, 84 aa, unidentified
  REGION 1..84: note = Description of Unknown:cds_NZ_WFIY01000004.1_cds_1448 target sequence
SAEVYIIGGVAEDRITVLSDIDILIVIKRKLSGKERKELSKKVLIRAMDFYSLPFDAPVELHIEDEENAKRFLSTSKKTIKITE

SEQ ID NO: 43244 - protein, 85 aa, unidentified
  REGION 1..85: note = Description of Unknown:cds_NZ_WFIY01000004.1_cds_1448 target sequence
EPSAEVYIIGGVAEDRITVLSDIDILIVIKRKLSGKERKELSKKVLIRAMDFYSLPFDAPVELHIEDEENAKRFLSTSKKTIKIT

SEQ ID NO: 43245 - protein, 85 aa, unidentified
  REGION 1..85: note = Description of Unknown:cds_NZ_WFIY01000004.1_cds_WP_155863528.1_1471 target sequence
NYLEEADELLDRGDIVQASEKYYKAAEEAIKLISRRLNLEPILSEVNKKERWKSEILFKAARLINEKYPEVFKMWKSAWKLHEDG

SEQ ID NO: 43246 - protein, 84 aa, unidentified
  REGION 1..84: note = Description of Unknown:cds_NZ_WFIY01000004.1_cds_WP_155863528.1_1471 target sequence
AIKLISRRLNLEPILSEVNKKERWKSEILFKAARLINEKYPEVFKMWKSAWKLHEDGFHECSLDLETTRVLGEIVKNTLMKILS

SEQ ID NO: 43247 - protein, 85 aa, unidentified
  REGION 1..85: note = Description of Unknown:cds_NZ_WFIY01000004.1_cds_WP_155863528.1_1471 target sequence
EAIKLISRRLNLEPILSEVNKKERWKSEILFKAARLINEKYPEVFKMWKSAWKLHEDGFHECSLDLETTRVLGEIVKNTLMKILS

SEQ ID NO: 43248 - protein, 85 aa, unidentified
  REGION 1..85: note = Description of Unknown:cds_NZ_WFIY01000004.1_cds_WP_155863710.1_1569 target sequence
DKYLLALLGEAGASGLAKAFYVRYKTTYFKEAFEDEQSHWSYFRKYRRSILEKPTYYALFIFGILISLLGYNAVKRVVRFVETNA

SEQ ID NO: 43249 - protein, 84 aa, unidentified
  REGION 1..84: note = Description of Unknown:cds_NZ_WFIY01000004.1_cds_WP_155863710.1_1569 target sequence
FKEAFEDEQSHWSYFRKYRRSILEKPTYYALFIFGILISLLGYNAVKRVVRFVETNAIRFYEKNFVIEGELKKILEEEKKHMNV

SEQ ID NO: 43250 - protein, 85 aa, unidentified
  REGION 1..85: note = Description of Unknown:cds_NZ_WFIY01000004.1_cds_WP_155863710.1_1569 target sequence
YFKEAFEDEQSHWSYFRKYRRSILEKPTYYALFIFGILISLLGYNAVKRVVRFVETNAIRFYEKNFVIEGELKKILEEEKKHMNV

SEQ ID NO: 43251 - protein, 85 aa, unidentified
  REGION 1..85: note = Description of Unknown:cds_NZ_WFIY01000004.1_cds_WP_155864136.1_2089 target sequence
SEEKLEKLMKLKGAIAAGEFKENGELAGYKGPMPEDLAKLVAMMCAANSLMAKTEAESFTKISGMKWTPLIGWAVAAGEYAVCVV

SEQ ID NO: 43252 - protein, 84 aa, unidentified
  REGION 1..84: note = Description of Unknown:cds_NZ_WFIY01000004.1_cds_WP_155864136.1_2089 target sequence
YKGPMPEDLAKLVAMMCAANSLMAKTEAESFTKISGMKWTPLIGWAVAAGEYAVCVVGRYGVFVKVNEADFNEIFKTLREVAGI

SEQ ID NO: 43253 - protein, 85 aa, unidentified
  REGION 1..85: note = Description of Unknown:cds_NZ_WFIY01000004.1_cds_WP_155864136.1_2089 target sequence
GYKGPMPEDLAKLVAMMCAANSLMAKTEAESFTKISGMKWTPLIGWAVAAGEYAVCVVGRYGVFVKVNEADFNEIFKTLREVAGI

SEQ ID NO: 43254 - protein, 85 aa, unidentified
  REGION 1..85: note = Description of Unknown:cds_NZ_WFIY01000004.1_cds_WP_013776498.1_2227 target sequence
QIEAKKVAALYARWLRLPEDALFHGGRGPVMKIYDALKSAKNKDDIKSILDLSKYEMEKQTLNDLTRLVNEILNRIQNMNDSDAV

SEQ ID NO: 43255 - protein, 84 aa, unidentified
  REGION 1..84: note = Description of Unknown:cds_NZ_WFIY01000004.1_cds_WP_013776498.1_2227 target sequence
PVMKIYDALKSAKNKDDIKSILDLSKYEMEKQTLNDLTRLVNEILNRIQNMNDSDAVAFTLEVFRYFQIALATKIEDIKKGYWA

SEQ ID NO: 43256 - protein, 85 aa, unidentified
  REGION 1..85: note = Description of Unknown:cds_NZ_WFIY01000004.1_cds_WP_013776498.1_2227 target sequence
GPVMKIYDALKSAKNKDDIKSILDLSKYEMEKQTLNDLTRLVNEILNRIQNMNDSDAVAFTLEVFRYFQIALATKIEDIKKGYWA

SEQ ID NO: 43257 - protein, 85 aa, unidentified
  REGION 1..85: note = Description of Unknown:cds_NZ_WFIY01000004.1_cds_WP_155864248.1_2232 target sequence
LEKYLEEKGYKLRVEGDRKIVDMNDYSFYIIGGNKCVFPIPLPTGKESLDDLVNMGIQYARASRLVQSLGSPVSYSVEGSSVLVI

SEQ ID NO: 43258 - protein, 84 aa, unidentified
  REGION 1..84: note = Description of Unknown:cds_NZ_WFIY01000004.1_cds_WP_155864248.1_2232 target sequence
YIIGGNKCVFPIPLPTGKESLDDLVNMGIQYARASRLVQSLGSPVSYSVEGSSVLVIKEFKDEKELENKLIDAMDKIESLRYFV

SEQ ID NO: 43259 - protein, 85 aa, unidentified
  REGION 1..85: note = Description of Unknown:cds_NZ_WFIY01000004.1_cds_WP_155864248.1_2232 target sequence
FYIIGGNKCVFPIPLPTGKESLDDLVNMGIQYARASRLVQSLGSPVSYSVEGSSVLVIKEFKDEKELENKLIDAMDKIESLRYFV

SEQ ID NO: 43260 - protein, 85 aa, unidentified
  REGION 1..85: note = Description of Unknown:cds_NC_030656.1_cds_YP_009268847.1_132 target sequence
ALFGALKKLLCIKVSDDRDQLNINGEDHNCEYRLVNNNNKSEKENKNMKVTFVNYSMASSTSSCSSVTTSTFSLSSFDEDVDETT

SEQ ID NO: 43261 - protein, 84 aa, unidentified
  REGION 1..84: note = Description of Unknown:cds_NC_030656.1_cds_YP_009268847.1_132 target sequence
NCEYRLVNNNNKSEKENKNMKVTFVNYSMASSTSSCSSVTTSTFSLSSFDEDVDETTPFNNASLKFSSNGSSGSMSNMLNNDSD

SEQ ID NO: 43262 - protein, 85 aa, unidentified
  REGION 1..85: note = Description of Unknown:cds_NC_030656.1_cds_YP_009268847.1_132 target sequence
HNCEYRLVNNNNKSEKENKNMKVTFVNYSMASSTSSCSSVTTSTFSLSSFDEDVDETTPFNNASLKFSSNGSSGSMSNMLNNDSD

SEQ ID NO: 43263 - protein, 85 aa, unidentified
  REGION 1..85: note = Description of Unknown:cds_NC_009884.1_cds_YP_001496945.1_20 target sequence
ALCILYNPYNADAKAIIVNIPGNANLMYAFELAKRQRKMHPQYSAIECQPNVIGNESDVKYIGFVKNFSRFIPIAVAESASDILQ

SEQ ID NO: 43264 - protein, 84 aa, unidentified
  REGION 1..84: note = Description of Unknown:cds_NC_009884.1_cds_YP_001496945.1_20 target sequence
AFELAKRQRKMHPQYSAIECQPNVIGNESDVKYIGFVKNFSRFIPIAVAESASDILQRYGPDVIAVPLERLLVSSLNELLSLSW

SEQ ID NO: 43265 - protein, 85 aa, unidentified
  REGION 1..85: note = Description of Unknown:cds_NC_009884.1_cds_YP_001496945.1_20 target sequence
YAFELAKRQRKMHPQYSAIECQPNVIGNESDVKYIGFVKNFSRFIPIAVAESASDILQRYGPDVIAVPLERLLVSSLNELLSLSW

SEQ ID NO: 43266 - protein, 85 aa, unidentified
  REGION 1..85: note = Description of Unknown:cds_NC_010495.1_cds_YP_001742040.1_3 target sequence
SSNYINDDSTSTFIINVDKSASPHLTKLHRTHSIIYIILTGDITMRSYAGFTRVEKEQVYSLARAGVPDDLICRRYDIDEDFLLR

SEQ ID NO: 43267 - protein, 84 aa, unidentified
  REGION 1..84: note = Description of Unknown:cds_NC_010495.1_cds_YP_001742040.1_3 target sequence
HRTHSIIYIILTGDITMRSYAGFTRVEKEQVYSLARAGVPDDLICRRYDIDEDFLLRVIDDVFVNLQEKRGYKGIFCKSDFLRG

SEQ ID NO: 43268 - protein, 85 aa, unidentified
  REGION 1..85: note = Description of Unknown:cds_NC_010495.1_cds_YP_001742040.1_3 target sequence
LHRTHSIIYIILTGDITMRSYAGFTRVEKEQVYSLARAGVPDDLICRRYDIDEDFLLRVIDDVFVNLQEKRGYKGIFCKSDFLRG

SEQ ID NO: 43269 - protein, 85 aa, unidentified
  REGION 1..85: note = Description of Unknown:cds_NC_010495.1_cds_YP_001742061.1_24 target sequence
TITTTDASGILCLVSSISECLELNYPNDECRQNAIMLWASILISANTAGRYVTSQSAPSGASQSFAYGSKPWVALYNQMKLLDTA

SEQ ID NO: 43270 - protein, 84 aa, unidentified
  REGION 1..84: note = Description of Unknown:cds_NC_010495.1_cds_YP_001742061.1_24 target sequence
ECRQNAIMLWASILISANTAGRYVTSQSAPSGASQSFAYGSKPWVALYNQMKLLDTAGCTGDLVEDPDGSGKPWFAVVRGSKCK

SEQ ID NO: 43271 - protein, 85 aa, unidentified
  REGION 1..85: note = Description of Unknown:cds_NC_010495.1_cds_YP_001742061.1_24 target sequence
DECRQNAIMLWASILISANTAGRYVTSQSAPSGASQSFAYGSKPWVALYNQMKLLDTAGCTGDLVEDPDGSGKPWFAVVRGSKCK

SEQ ID NO: 43272 - protein, 85 aa, unidentified
  REGION 1..85: note = Description of Unknown:cds_NC_010495.1_cds_YP_001742062.1_25 target sequence
TSLARFSYTQPCTIWHKNGTDKYGKPTFDAPVSIMCDYGFNDDVSTDAKGNEIVQKNTFWTEYTGAKVGDYIMIGTATEADPLAA

SEQ ID NO: 43273 - protein, 84 aa, unidentified
  REGION 1..84: note = Description of Unknown:cds_NC_010495.1_cds_YP_001742062.1_25 target sequence
DAPVSIMCDYGFNDDVSTDAKGNEIVQKNTFWTEYTGAKVGDYIMIGTATEADPLAAGANQILNVINYGSTFNRAEPPDFALVT

SEQ ID NO: 43274 - protein, 85 aa, unidentified
  REGION 1..85: note = Description of Unknown:cds_NC_010495.1_cds_YP_001742062.1_25 target sequence
FDAPVSIMCDYGFNDDVSTDAKGNEIVQKNTFWTEYTGAKVGDYIMIGTATEADPLAAGANQILNVINYGSTFNRAEPPDFALVT

SEQ ID NO: 43275 - protein, 85 aa, unidentified
  REGION 1..85: note = Description of Unknown:cds_NZ_WFIY01000004.1_cds_WP_155862619.1_398 target sequence
SRAPPTKWTCDICKNIIYWDELFTFTSKKTVVHYTCFREKALKTAKVDQEQLTAVLDSLEDELKMIVVYKQRLGKIKDEEVKKYM

SEQ ID NO: 43276 - protein, 84 aa, unidentified
  REGION 1..84: note = Description of Unknown:cds_NZ_WFIY01000004.1_cds_WP_155862619.1_398 target sequence
KKTVVHYTCFREKALKTAKVDQEQLTAVLDSLEDELKMIVVYKQRLGKIKDEEVKKYMEQAEKDAEKNSAMLTRAVEKLSGVLE

SEQ ID NO: 43277 - protein, 85 aa, unidentified
  REGION 1..85: note = Description of Unknown:cds_NZ_WFIY01000004.1_cds_WP_155862683.1_480 target sequence
EISIDDFSKVELKVGVIKSAERIEGTRLLKLIVDLGSEERQIISGIAEYYSPEQLIGKKVIVVANLKPKMIRGFESQGMILAAGC

SEQ ID NO: 43278 - protein, 84 aa, unidentified
  REGION 1..84: note = Description of Unknown:cds_NZ_WFIY01000004.1_cds_WP_155862683.1_480 target sequence
LLKLIVDLGSEERQIISGIAEYYSPEQLIGKKVIVVANLKPKMIRGFESQGMILAAGCKEDEDKGIKPTLLTVDGDVPPGTRVC

SEQ ID NO: 43279 - protein, 85 aa, unidentified
  REGION 1..85: note = Description of Unknown:cds_NZ_WFIY01000004.1_cds_WP_155863332.1_1298 target sequence
VAQSIGRVRTFIHLIAGCSYLSCGGASLTSLIDKQLLKLYIRGGRHRWRGWIAPLTPISVNAVARNIKGIKGTRAIPPTKPIIID

SEQ ID NO: 43280 - protein, 84 aa, unidentified
  REGION 1..84: note = Description of Unknown:cds_NZ_WFIY01000004.1_cds_WP_155863332.1_1298 target sequence
TSLIDKQLLKLYIRGGRHRWRGWIAPLTPISVNAVARNIKGIKGTRAIPPTKPIIIDIIRMSAYNLILIMLLYLFDNYTNYLED

SEQ ID NO: 43281 - protein, 85 aa, unidentified
  REGION 1..85: note = Description of Unknown:cds_NZ_WFIY01000004.1_cds_WP_155863332.1_1298 target sequence
LTSLIDKQLLKLYIRGGRHRWRGWIAPLTPISVNAVARNIKGIKGTRAIPPTKPIIIDIIRMSAYNLILIMLLYLFDNYTNYLED

SEQ ID NO: 43282 - protein, 85 aa, unidentified
  REGION 1..85: note = Description of Unknown:cds_NZ_WFIY01000004.1_cds_WP_155863470.1_1430 target sequence
LKIIGIGHEDFEEEGKIAKDFGGVYIGNKLILLEDLMKNEDEVIIIDSLRREGFIVMTVENIYPGIFSYNELENYLLNAKIKGIS

SEQ ID NO: 43283 - protein, 84 aa, unidentified
  REGION 1..84: note = Description of Unknown:cds_NZ_WFIY01000004.1_cds_WP_155863470.1_1430 target sequence
KLILLEDLMKNEDEVIIIDSLRREGFIVMTVENIYPGIFSYNELENYLLNAKIKGISPRITIVAFSKNYEELVRCFLNCKLSKK

SEQ ID NO: 43284 - protein, 85 aa, unidentified
  REGION 1..85: note = Description of Unknown:cds_NZ_WFIY01000004.1_cds_WP_155863470.1_1430 target sequence
NKLILLEDLMKNEDEVIIIDSLRREGFIVMTVENIYPGIFSYNELENYLLNAKIKGISPRITIVAFSKNYEELVRCFLNCKLSKK

SEQ ID NO: 43285 - protein, 85 aa, unidentified
  REGION 1..85: note = Description of Unknown:cds_NC_019843.3_cds_YP_009047212.1_11 target sequence
PILPLRKMLGIGGDRTEKLIPGMELSNWLPGGTSTTLELDPKQHSHSGLLRMASFGSMKMAPLMLLQLLGRGTLTMIQLLLHNSR

SEQ ID NO: 43286 - protein, 84 aa, unidentified
  REGION 1..84: note = Description of Unknown:cds_NC_019843.3_cds_YP_009047212.1_11 target sequence
WLPGGTSTTLELDPKQHSHSGLLRMASFGSMKMAPLMLLQLLGRGTLTMIQLLLHNSRPVLSFLKTSTLRGLEAIVNHLQEPLA

SEQ ID NO: 43287 - protein, 85 aa, unidentified
  REGION 1..85: note = Description of Unknown:cds_NC_003214.2_cds_NP_445679.1_14 target sequence
EKQDLEKIESDIINDWTEADDLDDALDFLFMEKVSEFKIKFKDPLKVTEEEYRELLGNYDSSNSVSSNGITIDQYTYDEDDDIMY

SEQ ID NO: 43288 - protein, 84 aa, unidentified
  REGION 1..84: note = Description of Unknown:cds_NC_003214.2_cds_NP_445679.1_14 target sequence
FLFMEKVSEFKIKFKDPLKVTEEEYRELLGNYDSSNSVSSNGITIDQYTYDEDDDIMYKLEFTYRKEDNKIYIYEVQGWREKKK

SEQ ID NO: 43289 - protein, 85 aa, unidentified
  REGION 1..85: note = Description of Unknown:cds_NC_030656.1_cds_YP_009268727.1_12 target sequence
FMSKIIIGANTLVFLISLKCFVYAAPVSTSTAAEDESPTERLKSILFIVFIIVCGLLAFIACSACGIIHQMIYQVTCCCRTLVSS

SEQ ID NO: 43290 - protein, 84 aa, unidentified
  REGION 1..84: note = Description of Unknown:cds_NC_030656.1_cds_YP_009268727.1_12 target sequence
STSTAAEDESPTERLKSILFIVFIIVCGLLAFIACSACGIIHQMIYQVTCCCRTLVSSICKKKNNYSLLKQKYEVPIDSTFTVG

SEQ ID NO: 43291 - protein, 85 aa, unidentified
  REGION 1..85: note = Description of Unknown:cds_NC_010495.1_cds_YP_001742068.1_31 target sequence
KIKMLILSVFLATSFCVSADAGLGKVTRDACRAVGEQAYAIADARDAGISIKDVVSVVAADGFINDEHKTLVMDNIKMIFITDPA

SEQ ID NO: 43292 - protein, 84 aa, unidentified
  REGION 1..84: note = Description of Unknown:cds_NC_010495.1_cds_YP_001742068.1_31 target sequence
RDACRAVGEQAYAIADARDAGISIKDVVSVVAADGFINDEHKTLVMDNIKMIFITDPAIQKDEAKEIAEMGCIMHFAEKYGDRM

SEQ ID NO: 43293 - protein, 85 aa, unidentified
  REGION 1..85: note = Description of Unknown:hvTR_P16797 target sequence
NSLLAELNRLGVAHATTEDVFIFVDRLFQHFSFLFQAEESGPRRLELVASVFEHLTVECVNDILDACSHPDVNVAETSNTCRPCP

SEQ ID NO: 43294 - protein, 84 aa, unidentified
  REGION 1..84: note = Description of Unknown:hvTR_P16797 target sequence
LFQHFSFLFQAEESGPRRLELVASVFEHLTVECVNDILDACSHPDVNVAETSNTCRPCPSPVPSAPKTVSGAQTSCATPRAPVT

SEQ ID NO: 43295 - protein, 85 aa, unidentified
  REGION 1..85: note = Description of Unknown:hvTR_Q69567.2 target sequence
HTQNIFFYILAQSAGNCIQSIGASVKAAMKQEQSDMEDKLIKCAGLLTQQQSMFIGLGLEQLSQLININLLSSASTKYVESYSKM

SEQ ID NO: 43296 - protein, 84 aa, unidentified
  REGION 1..84: note = Description of Unknown:hvTR_Q69567.2 target sequence
AMKQEQSDMEDKLIKCAGLLTQQQSMFIGLGLEQLSQLININLLSSASTKYVESYSKMLHGKELDFFNWCEPRFMFLHVINSMG

SEQ ID NO: 43297 - protein, 85 aa, unidentified
  REGION 1..85: note = Description of Unknown:vpeps_2H36_1 target sequence
GEKQDLEKIESDIINDWTEADDLDDALDFLFMEKVSEFKIKFKDPLKVTEEEYRELLGNYDSSNSVSSNGITIDQYTYDEDDDIM

SEQ ID NO: 43298 - protein, 85 aa, unidentified
  REGION 1..85: note = Description of Unknown:vpeps_2H36_1 target sequence
DFLFMEKVSEFKIKFKDPLKVTEEEYRELLGNYDSSNSVSSNGITIDQYTYDEDDDIMYKLEFTYRKEDNKIYIYEVQGWREKKK

SEQ ID NO: 43299 - protein, 85 aa, unidentified
  REGION 1..85: note = Description of Unknown:cds_NZ_WFIY01000004.1_cds_WP_205737127.1_108 target sequence
GSPSDHLANERTFLAWVRTGIALIGFGFVIAKFALFISILKGAKTLSSSSVTYGEVMIILGGIVIFYGLYSYLENEKDISRNQYR

SEQ ID NO: 43300 - protein, 84 aa, unidentified
  REGION 1..84: note = Description of Unknown:cds_NZ_WFIY01000004.1_cds_WP_205737127.1_108 target sequence
GFVIAKFALFISILKGAKTLSSSSVTYGEVMIILGGIVIFYGLYSYLENEKDISRNQYRPRVLPNMIFVGIILAITVILALFII

SEQ ID NO: 43301 - protein, 85 aa, unidentified
  REGION 1..85: note = Description of Unknown:cds_NZ_WFIY01000004.1_cds_WP_155862901.1_751 target sequence
SQAKNVGIVGVKAPEKVCNDKNCPFHGTLRVRGMIFEGKLIKFRANKTGVFERVYLYYNSKYKRYERRRSRIRVHIPPCLDVKEG

SEQ ID NO: 43302 - protein, 84 aa, unidentified
  REGION 1..84: note = Description of Unknown:cds_NZ_WFIY01000004.1_cds_WP_155862901.1_751 target sequence
GTLRVRGMIFEGKLIKFRANKTGVFERVYLYYNSKYKRYERRRSRIRVHIPPCLDVKEGDNVIIGECRPIAKSVSFVVLGKVGS

SEQ ID NO: 43303 - protein, 85 aa, unidentified
  REGION 1..85: note = Description of Unknown:cds_NZ_WFIY01000004.1_cds_WP_155862919.1_771 target sequence
VDSDKGNPRRILLYDAIQNKIRYEIKIKGVSTLSDFRIERKKIDKICIRNIECKEFIPFLVDLNLFNISSCDNFIDIVKKEEICE

SEQ ID NO: 43304 - protein, 84 aa, unidentified
  REGION 1..84: note = Description of Unknown:cds_NZ_WFIY01000004.1_cds_WP_155862919.1_771 target sequence
KGVSTLSDFRIERKKIDKICIRNIECKEFIPFLVDLNLFNISSCDNFIDIVKKEEICEIKFVNKFEKLVGPIIRTYDFNNYLYK

SEQ ID NO: 43305 - protein, 85 aa, unidentified
  REGION 1..85: note = Description of Unknown:cds_NZ_WFIY01000004.1_cds_WP_155863152.1_1081 target sequence
GNTNKLYSEILSSYVIIILIVLIMMGIMGVLAIPYYISPITYSNGGAPAGVTYLDAGIILIALVLVGIYLIERKQFEFGLVSVLF

SEQ ID NO: 43306 - protein, 84 aa, unidentified
  REGION 1..84: note = Description of Unknown:cds_NZ_WFIY01000004.1_cds_WP_155863152.1_1081 target sequence
IMGVLAIPYYISPITYSNGGAPAGVTYLDAGIILIALVLVGIYLIERKQFEFGLVSVLFVLIVLTILIWDLYGVNDVTNIMHNI

SEQ ID NO: 43307 - protein, 85 aa, unidentified
  REGION 1..85: note = Description of Unknown:cds_NZ_WFIY01000004.1_cds_WP_155864037.1_1971 target sequence
KRILRIPRFTKDGKPKTLELLVDSASINDKGFAQEAKFLLVIDDGNNRVGFQLTTAEASLLYHRLGYALNEASKEYIEMEEKSKK

SEQ ID NO: 43308 - protein, 84 aa, unidentified
  REGION 1..84: note = Description of Unknown:cds_NZ_WFIY01000004.1_cds_WP_155864037.1_1971 target sequence
INDKGFAQEAKFLLVIDDGNNRVGFQLTTAEASLLYHRLGYALNEASKEYIEMEEKSKKNYEEKKGSKKSEVEEDFSDLMNEEE

SEQ ID NO: 43309 - protein, 85 aa, unidentified
  REGION 1..85: note = Description of Unknown:cds_NC_003214.2_cds_NP_445688.1_23 target sequence
STQIQIKKLIERCDFLTTSVYEKYDLRNIIRNDERFIIRQGDLIITNKFIQNPAIRGLRHVHLTHLAFRGSHIILPYQNYTAVFH

SEQ ID NO: 43310 - protein, 84 aa, unidentified
  REGION 1..84: note = Description of Unknown:cds_NC_003214.2_cds_NP_445688.1_23 target sequence
RNIIRNDERFIIRQGDLIITNKFIQNPAIRGLRHVHLTHLAFRGSHIILPYQNYTAVFHNEHGLVIIPEKIEKLAFYTFENSID

SEQ ID NO: 43311 - protein, 85 aa, unidentified
  REGION 1..85: note = Description of Unknown:cds_NC_029316.1_cds_YP_009230273.1_20 target sequence
EREDFIEYLANSASAIFDHNQTKKLIDYFLSIYGLYKMRGVTMSADKIYRYIIRSVKLPYRQQVILYSIFSDYSMLTHEEKGKFL

SEQ ID NO: 43312 - protein, 84 aa, unidentified
  REGION 1..84: note = Description of Unknown:cds_NC_029316.1_cds_YP_009230273.1_20 target sequence
DYFLSIYGLYKMRGVTMSADKIYRYIIRSVKLPYRQQVILYSIFSDYSMLTHEEKGKFLYVLIEKMIDKLLEGADEADNKPRIF

SEQ ID NO: 43313 - protein, 85 aa, unidentified
  REGION 1..85: note = Description of Unknown:cds_NC_030656.1_cds_YP_009268771.1_56 target sequence
TYCLLNFILFIIFVILLYTMTFGSSNKMQLTIKNMNYWQNASQKIDNSLPSILDTVIFQDYNNPIYAKVNATYDSQNKKITIKFG

SEQ ID NO: 43314 - protein, 84 aa, unidentified
  REGION 1..84: note = Description of Unknown:cds_NC_030656.1_cds_YP_009268771.1_56 target sequence
KMQLTIKNMNYWQNASQKIDNSLPSILDTVIFQDYNNPIYAKVNATYDSQNKKITIKFGKDTKTFNLDSSSDRQTVFPILLLSK

SEQ ID NO: 43315 - protein, 85 aa, unidentified
  REGION 1..85: note = Description of Unknown:cds_NC_007409.1_cds_YP_319856.1_25 target sequence
GKSMEEGIFVKVFPSKAIFVIYKEVEIIVKPDYAGDTIKVKYVFNSDELQKKLVEYFNKFNVPYKEISKNEVEVYYDPMYQLDCF

SEQ ID NO: 43316 - protein, 84 aa, unidentified
  REGION 1..84: note = Description of Unknown:cds_NC_007409.1_cds_YP_319856.1_25 target sequence
IIVKPDYAGDTIKVKYVFNSDELQKKLVEYFNKFNVPYKEISKNEVEVYYDPMYQLDCFDHMFEKLTMGDTDYIDSILGRLLPI

SEQ ID NO: 43317 - protein, 85 aa, unidentified
  REGION 1..85: note = Description of Unknown:cds_NC_043030.1_cds_YP_009664548.1_13 target sequence
VEELKGIVETLLKFLKRTGQVRNPEGLFGLLVISRLFADRWGLKPPFDERDIQLYIQITQSGEAEFDTVAIKMVESVGKIPTQVN

SEQ ID NO: 43318 - protein, 84 aa, unidentified
  REGION 1..84: note = Description of Unknown:cds_NC_043030.1_cds_YP_009664548.1_13 target sequence
FGLLVISRLFADRWGLKPPFDERDIQLYIQITQSGEAEFDTVAIKMVESVGKIPTQVNVLQEYERTVKTGSLTGLLRRGRGGED

SEQ ID NO: 43319 - protein, 85 aa, unidentified
  REGION 1..85: note = Description of Unknown:cds_NC_024711.1_cds_YP_009052493.1_12 target sequence
KKYDEVSVVRQLNNIDAVIGINPASKVIKVAKNSAIGNGTSGKIDFLSHYCGYHVEIVDVIQQQKERDEEIAAKKAAKKAARKAK

SEQ ID NO: 43320 - protein, 84 aa, unidentified
  REGION 1..84: note = Description of Unknown:cds_NC_024711.1_cds_YP_009052493.1_12 target sequence
KVIKVAKNSAIGNGTSGKIDFLSHYCGYHVEIVDVIQQQKERDEEIAAKKAAKKAARKAKFAEDNTFKGITRAVDKRMRTIKRK

SEQ ID NO: 43321 - protein, 85 aa, unidentified
  REGION 1..85: note = Description of Unknown:cds_NZ_WFIY01000004.1_cds_WP_155862860.1_698 target sequence
KFNFKIWIEDDNGNSILGKGGVELLKEIINTGSISKAAENLNLSYKFAWEYVRKIESEIGGIEMKKGGKNAGGTIVSDKVQQLLK

SEQ ID NO: 43322 - protein, 84 aa, unidentified
  REGION 1..84: note = Description of Unknown:cds_NZ_WFIY01000004.1_cds_WP_155862860.1_698 target sequence
KEIINTGSISKAAENLNLSYKFAWEYVRKIESEIGGIEMKKGGKNAGGTIVSDKVQQLLKIYEEAMNEVSAVLEKYSKKLNDIK

SEQ ID NO: 43323 - protein, 85 aa, unidentified
  REGION 1..85: note = Description of Unknown:cds_NZ_WFIY01000004.1_cds_WP_155863025.1_908 target sequence
SDSNFSIYPKIIVEFENDLDKIRASTSDDAKKLIDLAYSLSLEMDKEVKKIFDDISSNISKETQEEIDRLRKKYADEREKKISEI

SEQ ID NO: 43324 - protein, 84 aa, unidentified
  REGION 1..84: note = Description of Unknown:cds_NZ_WFIY01000004.1_cds_WP_155863025.1_908 target sequence
TSDDAKKLIDLAYSLSLEMDKEVKKIFDDISSNISKETQEEIDRLRKKYADEREKKISEIKEKANKNLEKAVSEVLNAIKGAYK

SEQ ID NO: 43325 - protein, 85 aa, unidentified
  REGION 1..85: note = Description of Unknown:cds_NZ_WFIY01000004.1_cds_WP_155863964.1_1886 target sequence
YKVIVQIKDEERVPQAIRSVINLYNDLKGDAEIEVVFHQSAIKALVKGNPNEDYVKKLLSSGINVVGCMNSINALNLNVESLIKG

SEQ ID NO: 43326 - protein, 84 aa, unidentified
  REGION 1..84: note = Description of Unknown:cds_NZ_WFIY01000004.1_cds_WP_155863964.1_1886 target sequence
DLKGDAEIEVVFHQSAIKALVKGNPNEDYVKKLLSSGINVVGCMNSINALNLNVESLIKGISIVQAGVGEIVRKQAEGWIYLSL

SEQ ID NO: 43327 - protein, 85 aa, unidentified
  REGION 1..85: note = Description of Unknown:cds_NZ_WFIY01000004.1_cds_WP_155864273.1_2266 target sequence
IGNISDMAIIILVAILLLAGQKDVAGTVRNLGKTLEEIRRRQNEFKNEIMRELSETGEVTNSIKKDLSDEPIIRPYHQPTQDYKI

SEQ ID NO: 43328 - protein, 84 aa, unidentified
  REGION 1..84: note = Description of Unknown:cds_NZ_WFIY01000004.1_cds_WP_155864273.1_2266 target sequence
GTVRNLGKTLEEIRRRQNEFKNEIMRELSETGEVTNSIKKDLSDEPIIRPYHQPTQDYKIKQLEEEIKRLQSELERLKSSDRKN

SEQ ID NO: 43329 - protein, 85 aa, unidentified
  REGION 1..85: note = Description of Unknown:cds_NC_035460.1_cds_YP_009408006.1_55 target sequence
TSFIYFVFFIIFIVLAYFLSYYPTNKLQLSVVELEKENKRFKEIDNTFPASFNTILFSKGNTYTKSNVNTYYNSQLKTITVNVNS

SEQ ID NO: 43330 - protein, 84 aa, unidentified
  REGION 1..84: note = Description of Unknown:cds_NC_035460.1_cds_YP_009408006.1_55 target sequence
KLQLSVVELEKENKRFKEIDNTFPASFNTILFSKGNTYTKSNVNTYYNSQLKTITVNVNSKKQIFHLDNEDDVYTLLPILLLSK

SEQ ID NO: 43331 - protein, 85 aa, unidentified
  REGION 1..85: note = Description of Unknown:cds_NC_029316.1_cds_YP_009230301.1_48 target sequence
SNSSNPFSLYFWFIIFIGIIVSTIIFIYFLIVPFLQSVQCHYVLNASADKDVNFNNSVVSSFVTQYRQGYGSIASAGLNEIIIVL

SEQ ID NO: 43332 - protein, 84 aa, unidentified
  REGION 1..84: note = Description of Unknown:cds_NC_029316.1_cds_YP_009230301.1_48 target sequence
FIYFLIVPFLQSVQCHYVLNASADKDVNFNNSVVSSFVTQYRQGYGSIASAGLNEIIIVLTIIVLGLFAIFLYLYVTAIRKPGS

SEQ ID NO: 43333 - protein, 85 aa, unidentified
  REGION 1..85: note = Description of Unknown:cds_NC_029316.1_cds_YP_009230326.1_73 target sequence
AQNKLTGTYGKTLVQLAVNEAINWCEKHEPYDVPHCLKTFKDMGLQYTIDVLSEEGKLPPIDLGTSVGAERLKKRFSTLMKYYIN

SEQ ID NO: 43334 - protein, 84 aa, unidentified
  REGION 1..84: note = Description of Unknown:cds_NC_029316.1_cds_YP_009230326.1_73 target sequence
EKHEPYDVPHCLKTFKDMGLQYTIDVLSEEGKLPPIDLGTSVGAERLKKRFSTLMKYYINYYNDNYGDYNENWNEEGGCCNEQY

SEQ ID NO: 43335 - protein, 85 aa, unidentified
  REGION 1..85: note = Description of Unknown:cds_NC_005830.1_cds_YP_003745.1_20 target sequence
TYVCTACKLKFHTFEEFKIHVHLFHPELDKLVEPFPDRKEYRLSIRLDKQTYNMLLNIKNNIQRDNDIGLNTTIKALIYIVNYLL

SEQ ID NO: 43336 - protein, 84 aa, unidentified
  REGION 1..84: note = Description of Unknown:cds_NC_005830.1_cds_YP_003745.1_20 target sequence
PELDKLVEPFPDRKEYRLSIRLDKQTYNMLLNIKNNIQRDNDIGLNTTIKALIYIVNYLLSKGYTIDELTNLPNKVSVIVGGDK

SEQ ID NO: 43337 - protein, 85 aa, unidentified
  REGION 1..85: note = Description of Unknown:cds_NC_024711.1_cds_YP_009052534.1_57 target sequence
DKFIDVIVDGILSNFDFGFMFIVNVLTYIIIKVIDYFNGDNKVPTWQKRCVLVISIAAMIGIYITAGYDNTIMLVNSAILAPVFW

SEQ ID NO: 43338 - protein, 84 aa, unidentified
  REGION 1..84: note = Description of Unknown:cds_NC_024711.1_cds_YP_009052534.1_57 target sequence
VLTYIIIKVIDYFNGDNKVPTWQKRCVLVISIAAMIGIYITAGYDNTIMLVNSAILAPVFWSWVVSPILKKLGIGYKDIDNTIG

SEQ ID NO: 43339 - protein, 85 aa, unidentified
  REGION 1..85: note = Description of Unknown:cds_NZ_WFIY01000004.1_cds_WP_155862294.1_7 target sequence
LGFNCPVCGKAFGSMTGLRKHFRKNHSNLDRCPVCNKKVNNLAKHVMRMKDEDHQVLWYLYNNLRGLRNKELKTRIRMIAKEKLS

SEQ ID NO: 43340 - protein, 84 aa, unidentified
  REGION 1..84: note = Description of Unknown:cds_NZ_WFIY01000004.1_cds_WP_155862294.1_7 target sequence
HSNLDRCPVCNKKVNNLAKHVMRMKDEDHQVLWYLYNNLRGLRNKELKTRIRMIAKEKLSRGSTEVHFKSIIFSFSNNFAHFKF

SEQ ID NO: 43341 - protein, 85 aa, unidentified
  REGION 1..85: note = Description of Unknown:cds_NZ_WFIY01000004.1_cds_WP_048054636.1_367 target sequence
KFCPKCHSMMVPRKINGKNVYKCLKCGYEEEVKSSEVITTKIKHSETEKTLVLEEEMPQGAQKIKGVICPNCKNDEAYFWILQTR

SEQ ID NO: 43342 - protein, 84 aa, unidentified
  REGION 1..84: note = Description of Unknown:cds_NZ_WFIY01000004.1_cds_WP_048054636.1_367 target sequence
KCGYEEEVKSSEVITTKIKHSETEKTLVLEEEMPQGAQKIKGVICPNCKNDEAYFWILQTRAADEPATRFYKCTKCGKVWREYE

SEQ ID NO: 43343 - protein, 85 aa, unidentified
  REGION 1..85: note = Description of Unknown:cds_NZ_WFIY01000004.1_cds_433 target sequence
VTQGRIVKVTGYYRDPGFLERVISTFRKLWVDIDWVTARRISDDGLYEVYLLVRETKNTHLAILNLSKTVDVEKVEVLEDGKLVP

SEQ ID NO: 43344 - protein, 84 aa, unidentified
  REGION 1..84: note = Description of Unknown:cds_NZ_WFIY01000004.1_cds_433 target sequence
FRKLWVDIDWVTARRISDDGLYEVYLLVRETKNTHLAILNLSKTVDVEKVEVLEDGKLVPCQSNSFFIPSYTKVTTYSWGEKVG

SEQ ID NO: 43345 - protein, 85 aa, unidentified
  REGION 1..85: note = Description of Unknown:cds_NZ_WFIY01000004.1_cds_WP_155862731.1_538 target sequence
ELTPRLQDVINIVKQKGEINLKDLALELKVSPKTAKGYVRELTRLGFVEMDEKENVKLKVTQEDPVESLKKIIEIHESEINALKK

SEQ ID NO: 43346 - protein, 84 aa, unidentified
  REGION 1..84: note = Description of Unknown:cds_NZ_WFIY01000004.1_cds_WP_155862731.1_538 target sequence
ALELKVSPKTAKGYVRELTRLGFVEMDEKENVKLKVTQEDPVESLKKIIEIHESEINALKKEVEELKTEIIKLRKKGKYTTTED

SEQ ID NO: 43347 - protein, 85 aa, unidentified
  REGION 1..85: note = Description of Unknown:cds_NZ_WFIY01000004.1_cds_WP_155863022.1_904 target sequence
GGVSKKPISNIEKRLKRQQEEQQQKGKKKISKTGSEVISKNIQISDEMIKKIQEEIKREKMITPYELATKTNITLSVAKRILKDL

SEQ ID NO: 43348 - protein, 84 aa, unidentified
  REGION 1..84: note = Description of Unknown:cds_NZ_WFIY01000004.1_cds_WP_155863022.1_904 target sequence
KGKKKISKTGSEVISKNIQISDEMIKKIQEEIKREKMITPYELATKTNITLSVAKRILKDLNAQGVIKEAFRNRRTAIYINPQA

SEQ ID NO: 43349 - protein, 85 aa, unidentified
  REGION 1..85: note = Description of Unknown:cds_NZ_WFIY01000004.1_cds_WP_155863423.1_1405 target sequence
SWILRKYFFKEIFDEIEKDLALDPEILRLIMPVRYPQRNGVEELKKMIRELGIEDIEIKESKEPIDERRRAAAISSNMSPINIED

SEQ ID NO: 43350 - protein, 84 aa, unidentified
  REGION 1..84: note = Description of Unknown:cds_NZ_WFIY01000004.1_cds_WP_155863423.1_1405 target sequence
EILRLIMPVRYPQRNGVEELKKMIRELGIEDIEIKESKEPIDERRRAAAISSNMSPINIEDPVEVLWKIAERFKGDGLGNRKSK

SEQ ID NO: 43351 - protein, 85 aa, unidentified
  REGION 1..85: note = Description of Unknown:cds_NZ_WFIY01000004.1_cds_WP_155864290.1_2283 target sequence
LTFSEFFIYILLIKFYYFSPIIFLGFILLIKSTEYLRAPIAEAALLQKIGYSTKVMSFFNFLDSTLGVISGSIFTVLISLNAYVF

SEQ ID NO: 43352 - protein, 84 aa, unidentified
  REGION 1..84: note = Description of Unknown:cds_NZ_WFIY01000004.1_cds_WP_155864290.1_2283 target sequence
GFILLIKSTEYLRAPIAEAALLQKIGYSTKVMSFFNFLDSTLGVISGSIFTVLISLNAYVFVLLLAGLSSLSADLFLYRIIKEY

SEQ ID NO: 43353 - protein, 85 aa, unidentified
  REGION 1..85: note = Description of Unknown:cds_NC_019843.3_cds_YP_009047206.1_5 target sequence
DYVSLLNQIWQKYLNSPYTTCLYIPKPTAKYTPLVGTSLHPVLWNCQLSFAGYTESAVNSTKALAKQDAAQRIAWLLHKDGGIPD

SEQ ID NO: 43354 - protein, 84 aa, unidentified
  REGION 1..84: note = Description of Unknown:cds_NC_019843.3_cds_YP_009047206.1_5 target sequence
PKPTAKYTPLVGTSLHPVLWNCQLSFAGYTESAVNSTKALAKQDAAQRIAWLLHKDGGIPDGCSLYLRHSSLFAQSEEEEPFSN

SEQ ID NO: 43355 - protein, 85 aa, unidentified
  REGION 1..85: note = Description of Unknown:cds_NC_034440.1_cds_YP_009361859.1_5 target sequence
DYVSLLNQIWQKYLNLPDTVCLYIPKPASSFKPVAGTSLHPVQWECKITFAGYTEVAVNSTKALAKQDAARRIMWLLHRDGGIPD

SEQ ID NO: 43356 - protein, 84 aa, unidentified
  REGION 1..84: note = Description of Unknown:cds_NC_034440.1_cds_YP_009361859.1_5 target sequence
PKPASSFKPVAGTSLHPVQWECKITFAGYTEVAVNSTKALAKQDAARRIMWLLHRDGGIPDGCSLHMRHSSIFSDVPEETPFSE

SEQ ID NO: 43357 - protein, 85 aa, unidentified
  REGION 1..85: note = Description of Unknown:cds_NC_035464.1_cds_YP_009408151.1_5 target sequence
ITLDHDVPYDGYRHSAKGKLVVEFCKSFELRCWYRRSSTGNVHVAIDVDVDFLRELEIRAVLLDDPMRILNDLRRHAFHMPTGRL

SEQ ID NO: 43358 - protein, 84 aa, unidentified
  REGION 1..84: note = Description of Unknown:cds_NC_035464.1_cds_YP_009408151.1_5 target sequence
CKSFELRCWYRRSSTGNVHVAIDVDVDFLRELEIRAVLLDDPMRILNDLRRHAFHMPTGRLWDVKVDREGKRQAGQWEVLFSPE

SEQ ID NO: 43359 - protein, 85 aa, unidentified
  REGION 1..85: note = Description of Unknown:cds_NC_035464.1_cds_YP_009408157.1_11 target sequence
VDFSRQTWEGPVAVGVGGYVWNKVKGNTQVQTFVSKVGGKTNAGLILVALGVVAKAYKPESEAMNILGYLLAGLGAGALGDDLPA

SEQ ID NO: 43360 - protein, 84 aa, unidentified
  REGION 1..84: note = Description of Unknown:cds_NC_035464.1_cds_YP_009408157.1_11 target sequence
GNTQVQTFVSKVGGKTNAGLILVALGVVAKAYKPESEAMNILGYLLAGLGAGALGDDLPATGSQATFTNKSPEYPSPVSGVNVL

SEQ ID NO: 43361 - protein, 85 aa, unidentified
  REGION 1..85: note = Description of Unknown:vpeps_2J6B_1 target sequence
LYILNSAILPLKPGEEYTVKAKEITIQEAKELVTKEQFTSAIGHQATAELLSSILGVNVPMNRVQIKVTHGDRILAFMLKQRLPE

SEQ ID NO: 43362 - protein, 85 aa, unidentified
  REGION 1..85: note = Description of Unknown:vpeps_2J6B_1 target sequence
ITIQEAKELVTKEQFTSAIGHQATAELLSSILGVNVPMNRVQIKVTHGDRILAFMLKQRLPEGVVVKTTEELEKIGYELWLFEIQ

SEQ ID NO: 43363 - protein, 85 aa, unidentified
  REGION 1..85: note = Description of Unknown:cds_NC_024711.1_cds_YP_009052531.1_53 target sequence
TKDKLKDDVIRTICCLNSDISNKDRELLIKLFNSIIDYTNNTELEQKLAQLQQKYNELVTNINKVEKLANETKTQHNYLYSDVNN

SEQ ID NO: 43364 - protein, 84 aa, unidentified
  REGION 1..84: note = Description of Unknown:cds_NC_024711.1_cds_YP_009052531.1_53 target sequence
DRELLIKLFNSIIDYTNNTELEQKLAQLQQKYNELVTNINKVEKLANETKTQHNYLYSDVNNTLKPKINSIDERVTALENSSQS

SEQ ID NO: 43365 - protein, 85 aa, unidentified
  REGION 1..85: note = Description of Unknown:cds_NC_024711.1_cds_YP_009052555.2_78 target sequence
VHPPRGVNTTDTTVLVPINMIKIANTKIIKAKLYKDIINEQDSIINLHKIKYNALYKEVEILQNNLDNSNKVNDNLNKSIERIKR

SEQ ID NO: 43366 - protein, 84 aa, unidentified
  REGION 1..84: note = Description of Unknown:cds_NC_024711.1_cds_YP_009052555.2_78 target sequence
NTKIIKAKLYKDIINEQDSIINLHKIKYNALYKEVEILQNNLDNSNKVNDNLNKSIERIKRKNRYLVSGGAVCAIAFVVCLLVK

SEQ ID NO: 43367 - protein, 85 aa, unidentified
  REGION 1..85: note = Description of Unknown:cds_NZ_WFIY01000004.1_cds_WP_155862367.1_99 target sequence
YRCCDKEFQDEKSFKKHIKSAKHHHLTSSDSFKISLPKDYISSIIDNKESAIRLLGFLPYEDKVIIPLRLSRNVIGRVLKRSLIA

SEQ ID NO: 43368 - protein, 84 aa, unidentified
  REGION 1..84: note = Description of Unknown:cds_NZ_WFIY01000004.1_cds_WP_155862367.1_99 target sequence
HHLTSSDSFKISLPKDYISSIIDNKESAIRLLGFLPYEDKVIIPLRLSRNVIGRVLKRSLIAKVEGPYYDSGLINYKIDAGDIK

SEQ ID NO: 43369 - protein, 85 aa, unidentified
  REGION 1..85: note = Description of Unknown:cds_NZ_WFIY01000004.1_cds_WP_152941216.1_113 target sequence
EEDLKNKKESIKCCYRLSETDVECLFKLIELNKPITSIELAQIMGFSKTTAETSLKRLMDVGLVNRIKIEEKKIGRPKFVYSVIN

SEQ ID NO: 43370 - protein, 84 aa, unidentified
  REGION 1..84: note = Description of Unknown:cds_NZ_WFIY01000004.1_cds_WP_152941216.1_113 target sequence
CLFKLIELNKPITSIELAQIMGFSKTTAETSLKRLMDVGLVNRIKIEEKKIGRPKFVYSVINNIWGKISEDLKQCAKKILSAAS

SEQ ID NO: 43371 - protein, 85 aa, unidentified
  REGION 1..85: note = Description of Unknown:cds_NZ_WFIY01000004.1_cds_WP_155862756.1_568 target sequence
QLNLAEVVSNIFPITRDEIERIYINKNKFIVVIYDFSTFKSRKYEGELKRNKIIFWRNKIKLQVPLKDVRLLRKPLEVGKLDNFE

SEQ ID NO: 43372 - protein, 84 aa, unidentified
  REGION 1..84: note = Description of Unknown:cds_NZ_WFIY01000004.1_cds_WP_155862756.1_568 target sequence
INKNKFIVVIYDFSTFKSRKYEGELKRNKIIFWRNKIKLQVPLKDVRLLRKPLEVGKLDNFEIWEIKGNEKLPSFPLEMPIISS

SEQ ID NO: 43373 - protein, 85 aa, unidentified
  REGION 1..85: note = Description of Unknown:cds_NZ_WFIY01000004.1_cds_1132 target sequence
VEKIVENFVEKVKEKYAGKVTIVLFGSRARGDYWPSSDYDFIIFLEKVEDKINEAYELYKLKKGFSADIIVFSKDELKEKIVEKM

SEQ ID NO: 43374 - protein, 84 aa, unidentified
  REGION 1..84: note = Description of Unknown:cds_NZ_WFIY01000004.1_cds_1132 target sequence
FGSRARGDYWPSSDYDFIIFLEKVEDKINEAYELYKLKKGFSADIIVFSKDELKEKIVEKMLENKVVIYDGLGLFNSDTKGFKP

SEQ ID NO: 43375 - protein, 85 aa, unidentified
  REGION 1..85: note = Description of Unknown:cds_NZ_WFIY01000004.1_cds_WP_205737143.1_1445 target sequence
ETEYRINKRGIIIMTTFSLFYAMLEAGMDWDPKQGLLSPLNNCSSLYFYRFLYTALFLYPSYLASRKLFSLLTIWYFVYGSLAED

SEQ ID NO: 43376 - protein, 84 aa, unidentified
  REGION 1..84: note = Description of Unknown:cds_NZ_WFIY01000004.1_cds_WP_205737143.1_1445 target sequence
LEAGMDWDPKQGLLSPLNNCSSLYFYRFLYTALFLYPSYLASRKLFSLLTIWYFVYGSLAEDILYWIIMFKPPYSWSWFYKTGG

SEQ ID NO: 43377 - protein, 85 aa, unidentified
  REGION 1..85: note = Description of Unknown:cds_NZ_WFIY01000004.1_cds_WP_155864450.1_1647 target sequence
LIIILIATGYISDPIIDIPSFAIVGFLTYRIFYVIIKTRKRNLYSYNGKIGKALEDIPKGKEGYILIEGEYWRAIAEEPISSGDE

SEQ ID NO: 43378 - protein, 84 aa, unidentified
  REGION 1..84: note = Description of Unknown:cds_NZ_WFIY01000004.1_cds_WP_155864450.1_1647 target sequence
GFLTYRIFYVIIKTRKRNLYSYNGKIGKALEDIPKGKEGYILIEGEYWRAIAEEPISSGDEVIVVGMQDLKLIVRKNKNNEVII

SEQ ID NO: 43379 - protein, 85 aa, unidentified
  REGION 1..85: note = Description of Unknown:cds_NZ_WFIY01000004.1_cds_WP_155864457.1_1687 target sequence
LLVIPYFILWGLWGKYFRKIVTEGLKYVGDDYIDENYKIPPLSSVKININGKCAIIINGGTGWATIRINGGPREKVFKIRLLNTV

SEQ ID NO: 43380 - protein, 84 aa, unidentified
  REGION 1..84: note = Description of Unknown:cds_NZ_WFIY01000004.1_cds_WP_155864457.1_1687 target sequence
GLKYVGDDYIDENYKIPPLSSVKININGKCAIIINGGTGWATIRINGGPREKVFKIRLLNTVGTLEIINESRFFPIIVSIRRSP

SEQ ID NO: 43381 - protein, 85 aa, unidentified
  REGION 1..85: note = Description of Unknown:cds_NZ_WFIY01000004.1_cds_WP_013777088.1_1707 target sequence
IIFYAVGEKDRAKELVRIITKTRWKTISKHAIKISSSSIGPSIVIFKPTLAGLAVALWLKSKAEELGMTTSVGWFTPITNVPPQV

SEQ ID NO: 43382 - protein, 84 aa, unidentified
  REGION 1..84: note = Description of Unknown:cds_NZ_WFIY01000004.1_cds_WP_013777088.1_1707 target sequence
WKTISKHAIKISSSSIGPSIVIFKPTLAGLAVALWLKSKAEELGMTTSVGWFTPITNVPPQVEDAIKTDLNKILMKRLEVPWSP

SEQ ID NO: 43383 - protein, 85 aa, unidentified
  REGION 1..85: note = Description of Unknown:cds_NZ_WFIY01000004.1_cds_WP_155864122.1_2073 target sequence
KVIESLYDRSMSEHGLFAKDVLDEIIPKLKANAHYFRSKGSIFSLAPSNKYIWTMRINLKPFYVILCKYRYTYWTLPDLELKIID

SEQ ID NO: 43384 - protein, 84 aa, unidentified
  REGION 1..84: note = Description of Unknown:cds_NZ_WFIY01000004.1_cds_WP_155864122.1_2073 target sequence
EIIPKLKANAHYFRSKGSIFSLAPSNKYIWTMRINLKPFYVILCKYRYTYWTLPDLELKIIDCYRLKGEVEKYFKEKFYLVIEE

SEQ ID NO: 43385 - protein, 85 aa, unidentified
  REGION 1..85: note = Description of Unknown:cds_NZ_WFIY01000004.1_cds_WP_155864252.1_2243 target sequence
SEELLKPGEREMIQSRSYLYDLIDKLNDILENKKEILEQKGIAAKLSVTLELITLNRLYLDVIYKTYWNQLLEVINELNAIPELK

SEQ ID NO: 43386 - protein, 84 aa, unidentified
  REGION 1..84: note = Description of Unknown:cds_NZ_WFIY01000004.1_cds_WP_155864252.1_2243 target sequence
DKLNDILENKKEILEQKGIAAKLSVTLELITLNRLYLDVIYKTYWNQLLEVINELNAIPELKDDMVDVNADVEEIKKLKQQGGF

SEQ ID NO: 43387 - protein, 85 aa, unidentified
  REGION 1..85: note = Description of Unknown:cds_NC_003214.2_cds_NP_445727.1_62 target sequence
SYYPVKDRIEKIIDRHNSKFSEAEIHIIDALIKWLRGNHVDITLLYMFEQLIGFDPNRIPDEDKLAIMKLILTAHPDYLLKYDKP

SEQ ID NO: 43388 - protein, 84 aa, unidentified
  REGION 1..84: note = Description of Unknown:cds_NC_003214.2_cds_NP_445727.1_62 target sequence
EIHIIDALIKWLRGNHVDITLLYMFEQLIGFDPNRIPDEDKLAIMKLILTAHPDYLLKYDKPEDIARVFKSIPGFEDILKTIFT

SEQ ID NO: 43389 - protein, 85 aa, unidentified
  REGION 1..85: note = Description of Unknown:cds_NC_005830.1_cds_YP_003764.1_39 target sequence
EQRFTHEDRFIMGLFPLLAVILISSNSSIIDIAMTVIIFGWIIYETLITVHFCKNYIETVESIMLGFVGFLGVLCLDKFPFGIIL

SEQ ID NO: 43390 - protein, 84 aa, unidentified
  REGION 1..84: note = Description of Unknown:cds_NC_005830.1_cds_YP_003764.1_39 target sequence
SSNSSIIDIAMTVIIFGWIIYETLITVHFCKNYIETVESIMLGFVGFLGVLCLDKFPFGIILLIIYVIEGIYINVKTLKYARSC

SEQ ID NO: 43391 - protein, 85 aa, unidentified
  REGION 1..85: note = Description of Unknown:cds_NC_009884.1_cds_YP_001496936.1_11 target sequence
IDEYLKKNGIKFTQRQYNDKIKYTLLTPVASKISDVLKTVTEMMKFVDNNEYVVVPIAKAGDYMVELSLSQSSMSWRIAKKMTYI

SEQ ID NO: 43392 - protein, 84 aa, unidentified
  REGION 1..84: note = Description of Unknown:cds_NC_009884.1_cds_YP_001496936.1_11 target sequence
TLLTPVASKISDVLKTVTEMMKFVDNNEYVVVPIAKAGDYMVELSLSQSSMSWRIAKKMTYIDVTDKDIDVLMNVLQKLKNVKL

SEQ ID NO: 43393 - protein, 85 aa, unidentified
  REGION 1..85: note = Description of Unknown:cds_NC_010495.1_cds_YP_001742051.1_14 target sequence
IIQLNDIMKADIIQLEDYDMQLAFEIETVERQLQYADKKNDRVWHEKALKARDHMKRTRALIKTRLDKLYYGEERMIHGAILAQI

SEQ ID NO: 43394 - protein, 84 aa, unidentified
  REGION 1..84: note = Description of Unknown:cds_NC_010495.1_cds_YP_001742051.1_14 target sequence
FEIETVERQLQYADKKNDRVWHEKALKARDHMKRTRALIKTRLDKLYYGEERMIHGAILAQIRKEMSIGKFMSYVHRAKQEAGL

SEQ ID NO: 43395 - protein, 85 aa, unidentified
  REGION 1..85: note = Description of Unknown:cds_NC_043125.1_cds_YP_009664868.1_1 target sequence
NLHDGLKNDSLKNCVIDAITNIYETEFFISRRLRGYIDQMEKKEKNVIDFLEFFKYTEGRSGLVRGNWLQGNLNKCSSLFGVAVS

SEQ ID NO: 43396 - protein, 85 aa, unidentified
  REGION 1..85: note = Description of Unknown:cds_NC_043125.1_cds_YP_009664868.1_1 target sequence
ETEFFISRRLRGYIDQMEKKEKNVIDFLEFFKYTEGRSGLVRGNWLQGNLNKCSSLFGVAVSLLFKRIWSELFPELDCFIEVAHH

SEQ ID NO: 43397 - protein, 85 aa, unidentified
  REGION 1..85: note = Description of Unknown:cds_NZ_WFIY01000004.1_cds_WP_155862512.1_272 target sequence
PKRKQKEIDVCPNCGTKVDKPVKTWNLVSPLPDAEGRITITIMGSYVCPNCGYKWRGVVSKIKAGGSSVEIQGKNGTVKKIGDEK

SEQ ID NO: 43398 - protein, 84 aa, unidentified
  REGION 1..84: note = Description of Unknown:cds_NZ_WFIY01000004.1_cds_WP_155862512.1_272 target sequence
KTWNLVSPLPDAEGRITITIMGSYVCPNCGYKWRGVVSKIKAGGSSVEIQGKNGTVKKIGDEKPEKRDEGEIIELDLSDLDEEE

SEQ ID NO: 43399 - protein, 85 aa, unidentified
  REGION 1..85: note = Description of Unknown:cds_NZ_WFIY01000004.1_cds_WP_152939944.1_910 target sequence
LVRLEEKEFDKIFSKLKEQVYEYNSKISGSEVYLKPYHVVYKNGKKYIYIGKYWYKLEKYNGKIKWIYLGKEKPLANLPDPPKFP

SEQ ID NO: 43400 - protein, 84 aa, unidentified
  REGION 1..84: note = Description of Unknown:cds_NZ_WFIY01000004.1_cds_WP_152939944.1_910 target sequence
YNSKISGSEVYLKPYHVVYKNGKKYIYIGKYWYKLEKYNGKIKWIYLGKEKPLANLPDPPKFPEFTIIKDEKSYIVDEKFLNNF

SEQ ID NO: 43401 - protein, 85 aa, unidentified
  REGION 1..85: note = Description of Unknown:cds_NZ_WFIY01000004.1_cds_WP_155863252.1_1201 target sequence
ETQIDVRHNIKCCYKLSESDVDVFLKILEVRRPITSQELSKMLKVSKTTIDGSLKRLVDIGLVIRKKSENGKIGRPTYIYYLPVG

SEQ ID NO: 43402 - protein, 84 aa, unidentified
  REGION 1..84: note = Description of Unknown:cds_NZ_WFIY01000004.1_cds_WP_155863252.1_1201 target sequence
VFLKILEVRRPITSQELSKMLKVSKTTIDGSLKRLVDIGLVIRKKSENGKIGRPTYIYYLPVGIEEKIESDLKRCADQMLNTKV

SEQ ID NO: 43403 - protein, 85 aa, unidentified
  REGION 1..85: note = Description of Unknown:cds_NZ_WFIY01000004.1_cds_WP_162309162.1_1347 target sequence
RESKLRFWGVYITGIVTLILLSIHFFMLFANNLNFDNRISTPVVDEYLSNRVYYSLLGLLLVVAFIHGLLGVRRSLYDFGLKKGV

SEQ ID NO: 43404 - protein, 84 aa, unidentified
  REGION 1..84: note = Description of Unknown:cds_NZ_WFIY01000004.1_cds_WP_162309162.1_1347 target sequence
IHFFMLFANNLNFDNRISTPVVDEYLSNRVYYSLLGLLLVVAFIHGLLGVRRSLYDFGLKKGVKDVIIGGIIILLILLFFYFTT

SEQ ID NO: 43405 - protein, 85 aa, unidentified
  REGION 1..85: note = Description of Unknown:cds_NZ_WFIY01000004.1_cds_WP_155864432.1_1470 target sequence
LEEADELLDRGDIVQASEKYYKAAEEAIKTISVYLKISPENWTLASINRAALEISKDLGEEILDYWNSATALYTATLDQDTLKIL

SEQ ID NO: 43406 - protein, 84 aa, unidentified
  REGION 1..84: note = Description of Unknown:cds_NZ_WFIY01000004.1_cds_WP_155864432.1_1470 target sequence
AEEAIKTISVYLKISPENWTLASINRAALEISKDLGEEILDYWNSATALYTATLDQDTLKILIKDVKRLVEIANEKYNELLGRG

SEQ ID NO: 43407 - protein, 85 aa, unidentified
  REGION 1..85: note = Description of Unknown:cds_NZ_WFIY01000004.1_cds_WP_155863666.1_1541 target sequence
KVSIYPEKDSLEMCFEGSTIKMFLVGNELHIAEEVTYEVSTGEVLSKIQIVIKDGKAYLQSPFGLNEISAPENIFKGIRAVLEEI

SEQ ID NO: 43408 - protein, 84 aa, unidentified
  REGION 1..84: note = Description of Unknown:cds_NZ_WFIY01000004.1_cds_WP_155863666.1_1541 target sequence
FLVGNELHIAEEVTYEVSTGEVLSKIQIVIKDGKAYLQSPFGLNEISAPENIFKGIRAVLEEIKEKHKALYDKFYRFIPTSTAL

SEQ ID NO: 43409 - protein, 85 aa, unidentified
  REGION 1..85: note = Description of Unknown:cds_NZ_WFIY01000004.1_cds_WP_155864019.1_1950 target sequence
GKLTIEISDEVERELRTFVALGGYKKGKLSKVVEESIKEYISRHKITVRDDEIQFNLKDLEKDKLYLVDYEGEKYAIQVTSDNKI

SEQ ID NO: 43410 - protein, 84 aa, unidentified
  REGION 1..84: note = Description of Unknown:cds_NZ_WFIY01000004.1_cds_WP_155864019.1_1950 target sequence
GYKKGKLSKVVEESIKEYISRHKITVRDDEIQFNLKDLEKDKLYLVDYEGEKYAIQVTSDNKIRLYEVLEVENKAVEGGNNIRS

SEQ ID NO: 43411 - protein, 85 aa, unidentified
  REGION 1..85: note = Description of Unknown:cds_NC_009884.1_cds_YP_001496949.1_24 target sequence
VFRRGNNDEIKSTIRSIINPSGIIKYNVVYIPKYDAYRITLVSSTGNINASYIAEIISQLTAQGYAVMMKTPRSTLLRGGVVVLY

SEQ ID NO: 43412 - protein, 84 aa, unidentified
  REGION 1..84: note = Description of Unknown:cds_NC_009884.1_cds_YP_001496949.1_24 target sequence
IKYNVVYIPKYDAYRITLVSSTGNINASYIAEIISQLTAQGYAVMMKTPRSTLLRGGVVVLYAEKHHSNVGNDELPPPPLRKNW

SEQ ID NO: 43413 - protein, 85 aa, unidentified
  REGION 1..85: note = Description of Unknown:cds_NC_009884.1_cds_YP_001496972.1_47 target sequence
SLVIDIADTIVSLTALIGLIITLIKFHSQNKEDAIMQIRKIAQEEIVNFLDTDKFKHSIIDIMNESNVNSKVNDIDSKITQLLAI

SEQ ID NO: 43414 - protein, 84 aa, unidentified
  REGION 1..84: note = Description of Unknown:cds_NC_009884.1_cds_YP_001496972.1_47 target sequence
LIKFHSQNKEDAIMQIRKIAQEEIVNFLDTDKFKHSIIDIMNESNVNSKVNDIDSKITQLLAILCYTDSKLKDTELCRSSDRSK

SEQ ID NO: 43415 - protein, 85 aa, unidentified
  REGION 1..85: note = Description of Unknown:cds_NC_038931.1_cds_YP_009509152.1_36 target sequence
IAEQIFIIILVLTVLHTAIERIAKRSLSYSNVNYTYTQSISFLVGYTIVYIIMSHISHAVIISIMIMISYAIYIVIKMRNNQQIQ

SEQ ID NO: 43416 - protein, 84 aa, unidentified
  REGION 1..84: note = Description of Unknown:cds_NC_038931.1_cds_YP_009509152.1_36 target sequence
IAKRSLSYSNVNYTYTQSISFLVGYTIVYIIMSHISHAVIISIMIMISYAIYIVIKMRNNQQIQNDIEMFMFGMIAGLGIEIVG

SEQ ID NO: 43417 - protein, 85 aa, unidentified
  REGION 1..85: note = Description of Unknown:cds_NZ_WFIY01000004.1_cds_WP_013776209.1_189 target sequence
SQPAYKVEFEGKAKIGQIMGNLASIQLKPEDFSSPLSLQMALSRIYNELMKAMSQGPQTHYVADVKFTDSLGNPVSIGVDFGDKI

SEQ ID NO: 43418 - protein, 84 aa, unidentified
  REGION 1..84: note = Description of Unknown:cds_NZ_WFIY01000004.1_cds_WP_013776209.1_189 target sequence
LASIQLKPEDFSSPLSLQMALSRIYNELMKAMSQGPQTHYVADVKFTDSLGNPVSIGVDFGDKIPPLSKQDVKVKITIEFYDEE

SEQ ID NO: 43419 - protein, 85 aa, unidentified
  REGION 1..85: note = Description of Unknown:cds_NZ_WFIY01000004.1_cds_WP_155863774.1_1651 target sequence
LWEKVKELEEKFLRIQKEREKLEEELKRLPSGHIDKKKIGNHVYYYLRYWEEGKLKSKYLGKDAEELQQKIEYSMDIRKKVSLLR

SEQ ID NO: 43420 - protein, 84 aa, unidentified
  REGION 1..84: note = Description of Unknown:cds_NZ_WFIY01000004.1_cds_WP_155863774.1_1651 target sequence
LEEELKRLPSGHIDKKKIGNHVYYYLRYWEEGKLKSKYLGKDAEELQQKIEYSMDIRKKVSLLREEEKRLQKILDRIKNSLEFT

SEQ ID NO: 43421 - protein, 85 aa, unidentified
  REGION 1..85: note = Description of Unknown:cds_NZ_WFIY01000004.1_cds_WP_155863795.1_1678 target sequence
EYDFLTTREKIFYLLMYADEPLSAKQIMKILGVKKEKEVYSHIYHLAKSSKRKDYIIIMFPPECEDCGYVFKLEIPKKPSKCPVC

SEQ ID NO: 43422 - protein, 84 aa, unidentified
  REGION 1..84: note = Description of Unknown:cds_NZ_WFIY01000004.1_cds_WP_155863795.1_1678 target sequence
LSAKQIMKILGVKKEKEVYSHIYHLAKSSKRKDYIIIMFPPECEDCGYVFKLEIPKKPSKCPVCKSERIKPPSFLIRKKGKNNE

SEQ ID NO: 43423 - protein, 85 aa, unidentified
  REGION 1..85: note = Description of Unknown:cds_NZ_WFIY01000004.1_cds_WP_155863926.1_1840 target sequence
LPKKDPEAPVREVMKPAEGEVICVVKKMLGAEHIVVLCVDGKQRTARIPGRMRKKTWIKEGDVVLVAPWDFQPDKADIIHKYMHD

SEQ ID NO: 43424 - protein, 84 aa, unidentified
  REGION 1..84: note = Description of Unknown:cds_NZ_WFIY01000004.1_cds_WP_155863926.1_1840 target sequence
CVVKKMLGAEHIVVLCVDGKQRTARIPGRMRKKTWIKEGDVVLVAPWDFQPDKADIIHKYMHDEIKKLIDEGIVDKEILDQLRG

SEQ ID NO: 43425 - protein, 85 aa, unidentified
  REGION 1..85: note = Description of Unknown:cds_NZ_WFIY01000004.1_cds_WP_155864069.1_2008 target sequence
SQQQEIFATTADEIPGYMVIQILGIVVGTSLLYKKFDLNKEEEAKKFLELSEKARIVAMNEMIKKAKEFNSNAIISVRFDSHRIN

SEQ ID NO: 43426 - protein, 84 aa, unidentified
  REGION 1..84: note = Description of Unknown:cds_NZ_WFIY01000004.1_cds_WP_155864069.1_2008 target sequence
ILGIVVGTSLLYKKFDLNKEEEAKKFLELSEKARIVAMNEMIKKAKEFNSNAIISVRFDSHRINDEYDEIIAYGTAVKVIKNIH

SEQ ID NO: 43427 - protein, 85 aa, unidentified
  REGION 1..85: note = Description of Unknown:cds_NZ_WFIY01000004.1_cds_WP_155864133.1_2086 target sequence
MEEKEVVLKALEKVDKWYVQLAGIKGNELLIVSQREVPKEIEVEGRKLTVKHYYPEEYLTVITKDENEFRSYHVYYFVKTYMRKV

SEQ ID NO: 43428 - protein, 84 aa, unidentified
  REGION 1..84: note = Description of Unknown:cds_NZ_WFIY01000004.1_cds_WP_155864133.1_2086 target sequence
AGIKGNELLIVSQREVPKEIEVEGRKLTVKHYYPEEYLTVITKDENEFRSYHVYYFVKTYMRKVLDLLAYLEVNRIRIDERDLL

SEQ ID NO: 43429 - protein, 85 aa, unidentified
  REGION 1..85: note = Description of Unknown:cds_NC_029316.1_cds_YP_009230288.1_35 target sequence
KLAVKLEDYILELLDAYAEENGMTRSQALRVALKEEIPIINEDDGGKKNKVVIFYVTKDLLDYIDKIAEENGVTRSEVVRNAILK

SEQ ID NO: 43430 - protein, 84 aa, unidentified
  REGION 1..84: note = Description of Unknown:cds_NC_029316.1_cds_YP_009230288.1_35 target sequence
GMTRSQALRVALKEEIPIINEDDGGKKNKVVIFYVTKDLLDYIDKIAEENGVTRSEVVRNAILKLVNEYKNRIIHRARVGKLTL

SEQ ID NO: 43431 - protein, 85 aa, unidentified
  REGION 1..85: note = Description of Unknown:cds_NC_030656.1_cds_YP_009268749.1_34 target sequence
NKRKLLTMIRFSIKLLNTNYSDVLCGKYSLKSVLPRIKKKLVCKYTAQMCNGSESWYYIVLSLFKFVELRKHISCVNCDKKLSPR

SEQ ID NO: 43432 - protein, 84 aa, unidentified
  REGION 1..84: note = Description of Unknown:cds_NC_030656.1_cds_YP_009268749.1_34 target sequence
DVLCGKYSLKSVLPRIKKKLVCKYTAQMCNGSESWYYIVLSLFKFVELRKHISCVNCDKKLSPREFASLVNKCVQFLNVYDRYL

SEQ ID NO: 43433 - protein, 85 aa, unidentified
  REGION 1..85: note = Description of Unknown:vpeps_4HV0_1 target sequence
MVTVEEEVYEFLKKKAKEEGTSVPAVIRKILKEYFGIEDRTRDYKRQDLEGSYIIVNGKKYYRINCKLEKRNEILVKLELKKRGT

SEQ ID NO: 43434 - protein, 85 aa, unidentified
  REGION 1..85: note = Description of Unknown:vpeps_4HV0_1 target sequence
TSVPAVIRKILKEYFGIEDRTRDYKRQDLEGSYIIVNGKKYYRINCKLEKRNEILVKLELKKRGTTLNRFLKEMIMITVHHHHHH

SEQ ID NO: 43435 - protein, 85 aa, unidentified
  REGION 1..85: note = Description of Unknown:vpeps_4LID_1 target sequence
VSPQTRKEEELLEKQNSVFYLLTLGRKPYGSYLHIKIELDEDEKLEKEIYADNIKLENELRQLKRLYEVYQSVEIDDAQKAIQKE

SEQ ID NO: 43436 - protein, 85 aa, unidentified
  REGION 1..85: note = Description of Unknown:vpeps_4LID_1 target sequence
LLTLGRKPYGSYLHIKIELDEDEKLEKEIYADNIKLENELRQLKRLYEVYQSVEIDDAQKAIQKEALLTIAKILSVFDFHHHHHH

SEQ ID NO: 43437 - protein, 85 aa, unidentified
  REGION 1..85: note = Description of Unknown:cds_NZ_WFIY01000004.1_cds_WP_155862357.1_88 target sequence
LVTLKKLDTICPIVETIRIIGSEPKLLVLRYLLDGGKGFNELQRLTRLSSKTLSSTLKDLENNDLIKRIVISDRPFRVRYELTEK

SEQ ID NO: 43438 - protein, 84 aa, unidentified
  REGION 1..84: note = Description of Unknown:cds_NZ_WFIY01000004.1_cds_WP_155862357.1_88 target sequence
SEPKLLVLRYLLDGGKGFNELQRLTRLSSKTLSSTLKDLENNDLIKRIVISDRPFRVRYELTEKGKELKGVFEEIQKWGNKYLK

SEQ ID NO: 43439 - protein, 85 aa, unidentified
  REGION 1..85: note = Description of Unknown:cds_NZ_WFIY01000004.1_cds_WP_155862444.1_194 target sequence
TAIIVLTTISGLESGKKLARSLVEEKLAACVNIIPYVKSTYRWEGKVVEDDESLLIIKTDSSVKEKIIKRIKELHPYQLPEIITL

SEQ ID NO: 43440 - protein, 84 aa, unidentified
  REGION 1..84: note = Description of Unknown:cds_NZ_WFIY01000004.1_cds_WP_155862444.1_194 target sequence
SLVEEKLAACVNIIPYVKSTYRWEGKVVEDDESLLIIKTDSSVKEKIIKRIKELHPYQLPEIITLDVTGGLENYLNWIAESVQQ

SEQ ID NO: 43441 - protein, 85 aa, unidentified
  REGION 1..85: note = Description of Unknown:cds_NZ_WFIY01000004.1_cds_WP_155862524.1_288 target sequence
RVKLTVENVEELFLIDTGFSGDLIVKSDVFDEISAKPSDGGEICVAKDLCFSALQKVVSVNILSRQILCRALWVPEIEENIVGEG

SEQ ID NO: 43442 - protein, 84 aa, unidentified
  REGION 1..84: note = Description of Unknown:cds_NZ_WFIY01000004.1_cds_WP_155862524.1_288 target sequence
GDLIVKSDVFDEISAKPSDGGEICVAKDLCFSALQKVVSVNILSRQILCRALWVPEIEENIVGEGVLIKAGLLLDYKNFTISDP

SEQ ID NO: 43443 - protein, 85 aa, unidentified
  REGION 1..85: note = Description of Unknown:cds_NZ_WFIY01000004.1_cds_WP_013776097.1_303 target sequence
EYIYASLLLHSAKKDITEDNLKNVLTAAGVNVDEVRVKAVVAALKEVNIDEVLKNAAAMPVAAAAPAQAQAAPAKEEKKEEKKEE

SEQ ID NO: 43444 - protein, 84 aa, unidentified
  REGION 1..84: note = Description of Unknown:cds_NZ_WFIY01000004.1_cds_WP_013776097.1_303 target sequence
LKNVLTAAGVNVDEVRVKAVVAALKEVNIDEVLKNAAAMPVAAAAPAQAQAAPAKEEKKEEKKEEEKKGPSEEEIAGGLSSLFG

SEQ ID NO: 43445 - protein, 85 aa, unidentified
  REGION 1..85: note = Description of Unknown:cds_NZ_WFIY01000004.1_cds_WP_152940321.1_665 target sequence
KWQTECEKAYSLVVPYLRTILIKKLIDRGVPIRRASKIVGLSITSYEKHIKDDKIKKILMNEDINDMLDALASRLYSGDKIEPTT

SEQ ID NO: 43446 - protein, 84 aa, unidentified
  REGION 1..84: note = Description of Unknown:cds_NZ_WFIY01000004.1_cds_WP_152940321.1_665 target sequence
LIKKLIDRGVPIRRASKIVGLSITSYEKHIKDDKIKKILMNEDINDMLDALASRLYSGDKIEPTTFCLVCSATRKIFDLSPCIF

SEQ ID NO: 43447 - protein, 85 aa, unidentified
  REGION 1..85: note = Description of Unknown:cds_NZ_WFIY01000004.1_cds_WP_155862989.1_863 target sequence
SQQISFESELKTLLKTGKVIFGARRTIKSLKLGKIKAVIIASTLRTDLKADILYYSKISGVPIYEYPGSGWELGTLAGKPFMVST

SEQ ID NO: 43448 - protein, 84 aa, unidentified
  REGION 1..84: note = Description of Unknown:cds_NZ_WFIY01000004.1_cds_WP_155862989.1_863 target sequence
FGARRTIKSLKLGKIKAVIIASTLRTDLKADILYYSKISGVPIYEYPGSGWELGTLAGKPFMVSTIGVENEGDSKILQLAKPVS

SEQ ID NO: 43449 - protein, 85 aa, unidentified
  REGION 1..85: note = Description of Unknown:cds_NZ_WFIY01000004.1_cds_WP_155864403.1_1133 target sequence
VERGYYWFSCFASQQSVEFMLKGIEMKYTGSHTFTHDLSELLQKVEKILGVKATEEVYQACDFLTPHYTMSRSSIATSYDKRKAL

SEQ ID NO: 43450 - protein, 84 aa, unidentified
  REGION 1..84: note = Description of Unknown:cds_NZ_WFIY01000004.1_cds_WP_155864403.1_1133 target sequence
LKGIEMKYTGSHTFTHDLSELLQKVEKILGVKATEEVYQACDFLTPHYTMSRSSIATSYDKRKALECIKMSEIVRNWVKSQMKP

SEQ ID NO: 43451 - protein, 85 aa, unidentified
  REGION 1..85: note = Description of Unknown:cds_NZ_WFIY01000004.1_cds_1316 target sequence
LRTFYIRLLSANFVEKLLRPREACQLLSISYTTLLRWIREGKIRAITTEGWKYRIPYGEVKKYLERREEIRAVIYARVSSTDQKE

SEQ ID NO: 43452 - protein, 85 aa, unidentified
  REGION 1..85: note = Description of Unknown:cds_NZ_WFIY01000004.1_cds_1316 target sequence
EACQLLSISYTTLLRWIREGKIRAITTEGWKYRIPYGEVKKYLERREEIRAVIYARVSSTDQKEDLERQINYLTNYPSSRCKKLI

SEQ ID NO: 43453 - protein, 85 aa, unidentified
  REGION 1..85: note = Description of Unknown:cds_NC_003214.2_cds_NP_445710.1_45 target sequence
KIVTYVTTSNKNVKPKWADLVFSIPQVDLKTALVTVAHINDDVLLLRNDVNVLNKDVIVRFFKSFKTSAVVKYGNEVIGYYLTRA

SEQ ID NO: 43454 - protein, 84 aa, unidentified
  REGION 1..84: note = Description of Unknown:cds_NC_003214.2_cds_NP_445710.1_45 target sequence
VFSIPQVDLKTALVTVAHINDDVLLLRNDVNVLNKDVIVRFFKSFKTSAVVKYGNEVIGYYLTRADKSSRMTPTLTVTHYALKV

SEQ ID NO: 43455 - protein, 85 aa, unidentified
  REGION 1..85: note = Description of Unknown:cds_NC_029316.1_cds_YP_009230343.1_90 target sequence
VEKEEQQIFRHYECKTDECEIAIRITKGKRIGLSFVVDDEITNYTYYNIMKTDYGYAISFSKPVYKAKLGRKKDSVIIRAIIEKG

SEQ ID NO: 43456 - protein, 84 aa, unidentified
  REGION 1..84: note = Description of Unknown:cds_NC_029316.1_cds_YP_009230343.1_90 target sequence
IAIRITKGKRIGLSFVVDDEITNYTYYNIMKTDYGYAISFSKPVYKAKLGRKKDSVIIRAIIEKGFYIITFDKERKIIHLHKVP

SEQ ID NO: 43457 - protein, 85 aa, unidentified
  REGION 1..85: note = Description of Unknown:cds_NC_035464.1_cds_YP_009408155.1_9 target sequence
VAIVHEEVTFHTEVDDESVEAIRRIIRDQCGENPKPECWGPLVWSMFDSVARAIPCPKCRGEALEFLTFLHDLINIQKGSAIYNT

SEQ ID NO: 43458 - protein, 84 aa, unidentified
  REGION 1..84: note = Description of Unknown:cds_NC_035464.1_cds_YP_009408155.1_9 target sequence
IRRIIRDQCGENPKPECWGPLVWSMFDSVARAIPCPKCRGEALEFLTFLHDLINIQKGSAIYNTPQFLRKKKEEILSLLRTRGI

SEQ ID NO: 43459 - protein, 85 aa, unidentified
  REGION 1..85: note = Description of Unknown:cds_NZ_WFIY01000004.1_cds_WP_155862500.1_259 target sequence
IKYFFNGNQVTLLQDNSSLFIIMDVQIKLDKTNVTLTTSKIQFIDINIPFKYGNILKKGICKINNKLFICYVIAELKGSISEYDE

SEQ ID NO: 43460 - protein, 84 aa, unidentified
  REGION 1..84: note = Description of Unknown:cds_NZ_WFIY01000004.1_cds_WP_155862500.1_259 target sequence
FIIMDVQIKLDKTNVTLTTSKIQFIDINIPFKYGNILKKGICKINNKLFICYVIAELKGSISEYDENKVKEVYKEVVEVLNNVI

SEQ ID NO: 43461 - protein, 85 aa, unidentified
  REGION 1..85: note = Description of Unknown:cds_NZ_WFIY01000004.1_cds_WP_155862610.1_387 target sequence
QIKKPQLKIGEKTKIKANINGEDKEIVLLYLGGDKYIAFDAYCPHLGCDLEKYGVLIREEIVCQCHFSHFSIKDGKPTKGASKKP

SEQ ID NO: 43462 - protein, 84 aa, unidentified
  REGION 1..84: note = Description of Unknown:cds_NZ_WFIY01000004.1_cds_WP_155862610.1_387 target sequence
NGEDKEIVLLYLGGDKYIAFDAYCPHLGCDLEKYGVLIREEIVCQCHFSHFSIKDGKPTKGASKKPLKIYQVKVSKNGELIIEG

SEQ ID NO: 43463 - protein, 85 aa, unidentified
  REGION 1..85: note = Description of Unknown:cds_NZ_WFIY01000004.1_cds_WP_155862633.1_414 target sequence
KAKKLILVTSEAHPMHKAFLNVTEQLSKELGIEKEVKMEDYSFLADYGEKDDLGMSWLPQLFVELEDGKIVPILTKMPLGADLKA

SEQ ID NO: 43464 - protein, 84 aa, unidentified
  REGION 1..84: note = Description of Unknown:cds_NZ_WFIY01000004.1_cds_WP_155862633.1_414 target sequence
LNVTEQLSKELGIEKEVKMEDYSFLADYGEKDDLGMSWLPQLFVELEDGKIVPILTKMPLGADLKADSTKGKEEALNKIKSLTS

SEQ ID NO: 43465 - protein, 85 aa, unidentified
  REGION 1..85: note = Description of Unknown:cds_NZ_WFIY01000004.1_cds_WP_205737130.1_425 target sequence
KRMKSVILLLSLFLGMITAIPVGAQVGYSSPQGFEGVNIGAGLAIGLAAIGAGVAVGMAAAAGIGVLTERRDMFGTVLIFVAIGE

SEQ ID NO: 43466 - protein, 84 aa, unidentified
  REGION 1..84: note = Description of Unknown:cds_NZ_WFIY01000004.1_cds_WP_205737130.1_425 target sequence
IPVGAQVGYSSPQGFEGVNIGAGLAIGLAAIGAGVAVGMAAAAGIGVLTERRDMFGTVLIFVAIGEGIVVYGLVFAVLMLFAHV

SEQ ID NO: 43467 - protein, 85 aa, unidentified
  REGION 1..85: note = Description of Unknown:cds_NZ_WFIY01000004.1_cds_WP_013775843.1_560 target sequence
LGIDPNYRTSRQVVGEHQGHKVYGPVDPPKVLGIHGTIVGVDFDLCIADGSCITACPVNVFQWYDTPGHPASEKKADPINEQACI

SEQ ID NO: 43468 - protein, 84 aa, unidentified
  REGION 1..84: note = Description of Unknown:cds_NZ_WFIY01000004.1_cds_WP_013775843.1_560 target sequence
KVYGPVDPPKVLGIHGTIVGVDFDLCIADGSCITACPVNVFQWYDTPGHPASEKKADPINEQACIFCMACVNVCPVAAIDVKPP

SEQ ID NO: 43469 - protein, 85 aa, unidentified
  REGION 1..85: note = Description of Unknown:cds_NZ_WFIY01000004.1_cds_WP_155862828.1_657 target sequence
DIGLDDIINVNLLKKKYEDYANSLTFGSNIKAIVKDFISFIKQIRLSTFSSKLLEILDEQEIVAKRILLVYNIRYLLLIFYKSII

SEQ ID NO: 43470 - protein, 84 aa, unidentified
  REGION 1..84: note = Description of Unknown:cds_NZ_WFIY01000004.1_cds_WP_155862828.1_657 target sequence
YANSLTFGSNIKAIVKDFISFIKQIRLSTFSSKLLEILDEQEIVAKRILLVYNIRYLLLIFYKSIIQRMINKLINLIRSFLSLI

SEQ ID NO: 43471 - protein, 85 aa, unidentified
  REGION 1..85: note = Description of Unknown:cds_NZ_WFIY01000004.1_cds_WP_155862846.1_679 target sequence
SVYKFGNYYIAGISHVVKGYFQDVVLIYKDGNNWKVISAERFRSNDSTLNKIVSQVKFAVHEDDLRNAVEELRKAGIKLEEVNNI

SEQ ID NO: 43472 - protein, 84 aa, unidentified
  REGION 1..84: note = Description of Unknown:cds_NZ_WFIY01000004.1_cds_WP_155862846.1_679 target sequence
YFQDVVLIYKDGNNWKVISAERFRSNDSTLNKIVSQVKFAVHEDDLRNAVEELRKAGIKLEEVNNIPFPRKLLEGKKKIQAEFD

SEQ ID NO: 43473 - protein, 85 aa, unidentified
  REGION 1..85: note = Description of Unknown:cds_NZ_WFIY01000004.1_cds_WP_155862886.1_729 target sequence
KTLIVFLNKIDINKILHLQDKKDIYILNEILHIPISFYNWENNCYEEDKILDYVSKKLDNLSFEKIFLLTTLKLCNKIAQKHGKI

SEQ ID NO: 43474 - protein, 84 aa, unidentified
  REGION 1..84: note = Description of Unknown:cds_NZ_WFIY01000004.1_cds_WP_155862886.1_729 target sequence
DKKDIYILNEILHIPISFYNWENNCYEEDKILDYVSKKLDNLSFEKIFLLTTLKLCNKIAQKHGKIEIINIDDENMLRKLIASI

SEQ ID NO: 43475 - protein, 85 aa, unidentified
  REGION 1..85: note = Description of Unknown:cds_NZ_WFIY01000004.1_cds_WP_162309163.1_1465 target sequence
LLLDRVKVLVLIFLYVKGPLSFTELLNMINEVNELTKKERITKGNLDSHIKVMLNNGLIERRESFYFITGKKVIYKITEKGKEEL

SEQ ID NO: 43476 - protein, 84 aa, unidentified
  REGION 1..84: note = Description of Unknown:cds_NZ_WFIY01000004.1_cds_WP_162309163.1_1465 target sequence
SFTELLNMINEVNELTKKERITKGNLDSHIKVMLNNGLIERRESFYFITGKKVIYKITEKGKEELFNTIKELEYIRDLIKENKK

SEQ ID NO: 43477 - protein, 85 aa, unidentified
  REGION 1..85: note = Description of Unknown:cds_NZ_WFIY01000004.1_cds_WP_013776955.1_1846 target sequence
DSGISITAEKLIELTVKKASLISVKEDEIVRAVGYSSKDMAERVIDKVSFWLSYEQNHLLYCKLCNKGPFTKRGLFLHLTRVHRM

SEQ ID NO: 43478 - protein, 84 aa, unidentified
  REGION 1..84: note = Description of Unknown:cds_NZ_WFIY01000004.1_cds_WP_013776955.1_1846 target sequence
SLISVKEDEIVRAVGYSSKDMAERVIDKVSFWLSYEQNHLLYCKLCNKGPFTKRGLFLHLTRVHRMEIKAMLEDELKREIKALI

SEQ ID NO: 43479 - protein, 85 aa, unidentified
  REGION 1..85: note = Description of Unknown:cds_NZ_WFIY01000004.1_cds_1947 target sequence
DKVDILLKEAEIDIKNGCYNKAVSASYFAVRMEIEKLARKLRTTIPKRDDKLINILKHMGKDELARECLYLYERRKDADYGYESL

SEQ ID NO: 43480 - protein, 85 aa, unidentified
  REGION 1..85: note = Description of Unknown:cds_NZ_WFIY01000004.1_cds_1947 target sequence
NKAVSASYFAVRMEIEKLARKLRTTIPKRDDKLINILKHMGKDELARECLYLYERRKDADYGYESLKEDLAIKCLELSKYLVQEI

SEQ ID NO: 43481 - protein, 85 aa, unidentified
  REGION 1..85: note = Description of Unknown:cds_NZ_WFIY01000004.1_cds_WP_155864303.1_2298 target sequence
LIKIPYKTEKIFPSDVKGKYAYMKDTVIIIRNQSKVLYIDCAHCNLANYKPPSFLSNYIFEYEIMEGGEYCECIAKTLQEQLKPL

SEQ ID NO: 43482 - protein, 84 aa, unidentified
  REGION 1..84: note = Description of Unknown:cds_NZ_WFIY01000004.1_cds_WP_155864303.1_2298 target sequence
YAYMKDTVIIIRNQSKVLYIDCAHCNLANYKPPSFLSNYIFEYEIMEGGEYCECIAKTLQEQLKPLFRNPKLCKDEDVTVVIER

SEQ ID NO: 43483 - protein, 85 aa, unidentified
  REGION 1..85: note = Description of Unknown:cds_NC_035460.1_cds_YP_009407985.1_34 target sequence
NPNPHYANTPFFVDTKDGKYLVLKAIKMCNVPTVPCLESKASCVLQVEKPKSVCDTSKRISSPPQPTGIKCERVREQTVPFMKTN

SEQ ID NO: 43484 - protein, 84 aa, unidentified
  REGION 1..84: note = Description of Unknown:cds_NC_035460.1_cds_YP_009407985.1_34 target sequence
YLVLKAIKMCNVPTVPCLESKASCVLQVEKPKSVCDTSKRISSPPQPTGIKCERVREQTVPFMKTNLLENIQTNNQNMMARLFQ

SEQ ID NO: 43485 - protein, 85 aa, unidentified
  REGION 1..85: note = Description of Unknown:cds_NC_035460.1_cds_YP_009407996.1_45 target sequence
AQKFVTDKIKEDRITLFIKEGCPFCKRAIDFLTQRQFRKYKLSIYDIAEFKQEHELRDYFYTSTGANTVPRIFIGLTSIGGYSDM

SEQ ID NO: 43486 - protein, 84 aa, unidentified
  REGION 1..84: note = Description of Unknown:cds_NC_035460.1_cds_YP_009407996.1_45 target sequence
EGCPFCKRAIDFLTQRQFRKYKLSIYDIAEFKQEHELRDYFYTSTGANTVPRIFIGLTSIGGYSDMIELYQTGELYDMISVAKC

SEQ ID NO: 43487 - protein, 85 aa, unidentified
  REGION 1..85: note = Description of Unknown:cds_NC_009884.1_cds_YP_001496930.1_5 target sequence
GRKKMMEKEKIEEMIKEINEELDKLCLFPLEFVDGGWRYYVHANAINQIFDELEDDLSKVPALRKFLNIAIYDLDFNGGYYWIPY

SEQ ID NO: 43488 - protein, 84 aa, unidentified
  REGION 1..84: note = Description of Unknown:cds_NC_009884.1_cds_YP_001496930.1_5 target sequence
EELDKLCLFPLEFVDGGWRYYVHANAINQIFDELEDDLSKVPALRKFLNIAIYDLDFNGGYYWIPYDEPPSGVTTPAMRFMALK

SEQ ID NO: 43489 - protein, 85 aa, unidentified
  REGION 1..85: note = Description of Unknown:cds_NC_009884.1_cds_YP_001496933.1_8 target sequence
LKRISFKVEDELARNLDKYSMQNHLTRSEAIRQILREKLSIMQIPTDKGKVVSGIIINDEIYECKYCHTRYLSHTGIVYHLEREH

SEQ ID NO: 43490 - protein, 84 aa, unidentified
  REGION 1..84: note = Description of Unknown:cds_NC_009884.1_cds_YP_001496933.1_8 target sequence
MQNHLTRSEAIRQILREKLSIMQIPTDKGKVVSGIIINDEIYECKYCHTRYLSHTGIVYHLEREHNIKKPFSPHIIKIVGDKNE

SEQ ID NO: 43491 - protein, 85 aa, unidentified
  REGION 1..85: note = Description of Unknown:cds_NC_007409.1_cds_YP_319839.1_8 target sequence
LLCNFIYALHSCSPDYIMRILTFKFSLFLSFRGKSYATLHIGFSLHHSTIIGENSCPVLLSVTLSLHSFTLYTIGSAPLVSTPRT

SEQ ID NO: 43492 - protein, 84 aa, unidentified
  REGION 1..84: note = Description of Unknown:cds_NC_007409.1_cds_YP_319839.1_8 target sequence
LTFKFSLFLSFRGKSYATLHIGFSLHHSTIIGENSCPVLLSVTLSLHSFTLYTIGSAPLVSTPRTSQPSSLPVGMNNAFSFNFL

SEQ ID NO: 43493 - protein, 85 aa, unidentified
  REGION 1..85: note = Description of Unknown:cds_NC_007409.1_cds_YP_319890.1_59 target sequence
VRAGGFDSKTMENLAISVIFIVVLLAVGGFIVADLFTTLGAYTPTVSQNNPLYNATTSVIHGMQSLGGLFSSSIGLITILIIIAI

SEQ ID NO: 43494 - protein, 84 aa, unidentified
  REGION 1..84: note = Description of Unknown:cds_NC_007409.1_cds_YP_319890.1_59 target sequence
IVVLLAVGGFIVADLFTTLGAYTPTVSQNNPLYNATTSVIHGMQSLGGLFSSSIGLITILIIIAIVSVIIVLLRTSFSSGGTGS

SEQ ID NO: 43495 - protein, 85 aa, unidentified
  REGION 1..85: note = Description of Unknown:hvTR_P06932 target sequence
IGKEVTVQDIILELSEVQPEVLPVDLFCEEELPNEQETEEEPDNERISYKVIAPCGCRNCEVKLRIFVHATEFGIRAFQQLLTGD

SEQ ID NO: 43496 - protein, 84 aa, unidentified
  REGION 1..84: note = Description of Unknown:hvTR_P06932 target sequence
PEVLPVDLFCEEELPNEQETEEEPDNERISYKVIAPCGCRNCEVKLRIFVHATEFGIRAFQQLLTGDLQLLCPDCRGNCKHDGS

SEQ ID NO: 43497 - protein, 85 aa, unidentified
  REGION 1..85: note = Description of Unknown:vpeps_6EXP_1 target sequence
NYKELEKMLDVIFENSEIKEIDLFFDPEVEISKQEFEDLVKNADPLQKVVGDNYITETFEWWEFENQYLEFELDYYVKDEKIFVL

SEQ ID NO: 43498 - protein, 85 aa, unidentified
  REGION 1..85: note = Description of Unknown:vpeps_6EXP_1 target sequence
KEIDLFFDPEVEISKQEFEDLVKNADPLQKVVGDNYITETFEWWEFENQYLEFELDYYVKDEKIFVLEMHFWRKIRKLEHHHHHH

SEQ ID NO: 43499 - protein, 85 aa, unidentified
  REGION 1..85: note = Description of Unknown:cds_NZ_WFIY01000004.1_cds_WP_155862668.1_463 target sequence
KLRIDKLPKTDEDLEEIQQEIESEHHHHHEEEGQSIEEVLGELYIRLQSLESKSKELEDSSETCKEEISRIYKILGKMLIALTTK

SEQ ID NO: 43500 - protein, 84 aa, unidentified
  REGION 1..84: note = Description of Unknown:cds_NZ_WFIY01000004.1_cds_WP_155862668.1_463 target sequence
QEIESEHHHHHEEEGQSIEEVLGELYIRLQSLESKSKELEDSSETCKEEISRIYKILGKMLIALTTKDENEKIKNLKDILSTLE

SEQ ID NO: 43501 - protein, 85 aa, unidentified
  REGION 1..85: note = Description of Unknown:cds_NZ_WFIY01000004.1_cds_WP_152940280.1_693 target sequence
LLKLYCDKIFHVNITQLVILTNLAEGELSIKELAEYTGIPKKNIIKAMKSLENRGYVEKRAIIGRDIIFSITEEGLEELYKYYLF

SEQ ID NO: 43502 - protein, 84 aa, unidentified
  REGION 1..84: note = Description of Unknown:cds_NZ_WFIY01000004.1_cds_WP_152940280.1_693 target sequence
LTNLAEGELSIKELAEYTGIPKKNIIKAMKSLENRGYVEKRAIIGRDIIFSITEEGLEELYKYYLFMKKLIEDMEFTLCSRFDC

SEQ ID NO: 43503 - protein, 85 aa, unidentified
  REGION 1..85: note = Description of Unknown:cds_NZ_WFIY01000004.1_cds_WP_013775678.1_726 target sequence
PSIKVIFGSYGDNGVTSLLYEVIQSLPNKYDIKIDVETDLLYDYSSPMIEIDGRRILFDYIDENDAKVKLSKLIKGELIEDHKPF

SEQ ID NO: 43504 - protein, 84 aa, unidentified
  REGION 1..84: note = Description of Unknown:cds_NZ_WFIY01000004.1_cds_WP_013775678.1_726 target sequence
LYEVIQSLPNKYDIKIDVETDLLYDYSSPMIEIDGRRILFDYIDENDAKVKLSKLIKGELIEDHKPFKIFYSQNGIFGNGVSVL

SEQ ID NO: 43505 - protein, 85 aa, unidentified
  REGION 1..85: note = Description of Unknown:cds_NZ_WFIY01000004.1_cds_WP_155863288.1_1244 target sequence
VKYKLVLISLILMILAIFPYLPTSIIKAQQPYNITTITVTVTIISTTTITEYVTSYITSIHTVLSTSIITKTIVHTVPYNLPETV

SEQ ID NO: 43506 - protein, 84 aa, unidentified
  REGION 1..84: note = Description of Unknown:cds_NZ_WFIY01000004.1_cds_WP_155863288.1_1244 target sequence
PYLPTSIIKAQQPYNITTITVTVTIISTTTITEYVTSYITSIHTVLSTSIITKTIVHTVPYNLPETVIIIILVTIIIYLLIRRK

SEQ ID NO: 43507 - protein, 85 aa, unidentified
  REGION 1..85: note = Description of Unknown:cds_NZ_WFIY01000004.1_cds_WP_155864454.1_1660 target sequence
MVFRGLLQVIIAYIIYRYGDMYGYEIKRKLEEIHGKKLPHGLVYITLKRMVNSDILEIYEKDGKKYYKLSEGGKEFLDNHVKVLQ

SEQ ID NO: 43508 - protein, 84 aa, unidentified
  REGION 1..84: note = Description of Unknown:cds_NZ_WFIY01000004.1_cds_WP_155864454.1_1660 target sequence
GDMYGYEIKRKLEEIHGKKLPHGLVYITLKRMVNSDILEIYEKDGKKYYKLSEGGKEFLDNHVKVLQKVRSIIDEIVNFMNSTH

SEQ ID NO: 43509 - protein, 85 aa, unidentified
  REGION 1..85: note = Description of Unknown:cds_NC_019843.3_cds_YP_009047205.1_4 target sequence
RVQRPPTLLLVFSLSLLVTASSKPLYVPEHCQNYSGCMLRACIKTAQADTAGLYTNFRIDVPSAESTGTQSVSVDLESTSTHDGP

SEQ ID NO: 43510 - protein, 84 aa, unidentified
  REGION 1..84: note = Description of Unknown:cds_NC_019843.3_cds_YP_009047205.1_4 target sequence
TASSKPLYVPEHCQNYSGCMLRACIKTAQADTAGLYTNFRIDVPSAESTGTQSVSVDLESTSTHDGPTEHVTSVNLFDVGYSVN

SEQ ID NO: 43511 - protein, 85 aa, unidentified
  REGION 1..85: note = Description of Unknown:cds_NC_003214.2_cds_NP_445683.1_18 target sequence
VEVKQKTIKYKLIIDTRDDSITLEGTIEAIITVKESEIKYRDKQEKFMGNMQTITENEIQNEVTDVKGDIDETLNKRFERYVNVL

SEQ ID NO: 43512 - protein, 84 aa, unidentified
  REGION 1..84: note = Description of Unknown:cds_NC_003214.2_cds_NP_445683.1_18 target sequence
DSITLEGTIEAIITVKESEIKYRDKQEKFMGNMQTITENEIQNEVTDVKGDIDETLNKRFERYVNVLKTLEKIAEMIGAEIEVN

SEQ ID NO: 43513 - protein, 85 aa, unidentified
  REGION 1..85: note = Description of Unknown:cds_NZ_WFIY01000004.1_cds_WP_155862499.1_258 target sequence
LFSVKLLVLEDPGRLRDVFYSMEGILTNICKPIRLGASYICSVSKNTLISVYLSGNLKNFQLLIEIESEDAEELTTTLDRIINEL

SEQ ID NO: 43514 - protein, 84 aa, unidentified
  REGION 1..84: note = Description of Unknown:cds_NZ_WFIY01000004.1_cds_WP_155862499.1_258 target sequence
FYSMEGILTNICKPIRLGASYICSVSKNTLISVYLSGNLKNFQLLIEIESEDAEELTTTLDRIINELKSKGIHITLFNTSTTSL

SEQ ID NO: 43515 - protein, 85 aa, unidentified
  REGION 1..85: note = Description of Unknown:cds_NZ_WFIY01000004.1_cds_WP_155862854.1_691 target sequence
LKHLEYMRHSMTEPLVTIYLYKKVEDGKIISAFRIMMYKDSIISIYEDDKLQGGVISDIENGGVDKAYEIIKKYYDDTSDDMIIY

SEQ ID NO: 43516 - protein, 84 aa, unidentified
  REGION 1..84: note = Description of Unknown:cds_NZ_WFIY01000004.1_cds_WP_155862854.1_691 target sequence
IYLYKKVEDGKIISAFRIMMYKDSIISIYEDDKLQGGVISDIENGGVDKAYEIIKKYYDDTSDDMIIYGEKDLVDQLLEKFDQQ

SEQ ID NO: 43517 - protein, 85 aa, unidentified
  REGION 1..85: note = Description of Unknown:cds_NZ_WFIY01000004.1_cds_WP_013775541.1_869 target sequence
PTKARIRLWSTNVKDLNYVVTQIKAIVDKTGISMRGPVPLPTKRLEVPVMKLPHGEGRKKWEKWEMSIHKRVIDIAADERVMRQL

SEQ ID NO: 43518 - protein, 84 aa, unidentified
  REGION 1..84: note = Description of Unknown:cds_NZ_WFIY01000004.1_cds_WP_013775541.1_869 target sequence
YVVTQIKAIVDKTGISMRGPVPLPTKRLEVPVMKLPHGEGRKKWEKWEMSIHKRVIDIAADERVMRQLMRVRVPEDVYIEIELI

SEQ ID NO: 43519 - protein, 85 aa, unidentified
  REGION 1..85: note = Description of Unknown:cds_NZ_WFIY01000004.1_cds_WP_155863094.1_1008 target sequence
ELVVTDPEDILRVSTAFSSMTRINILKLVAEKPKSITELSNELMMSKGNISSQVAELQNAGLIEISYENGEKGIKKMIKSKYDKI

SEQ ID NO: 43520 - protein, 84 aa, unidentified
  REGION 1..84: note = Description of Unknown:cds_NZ_WFIY01000004.1_cds_WP_155863094.1_1008 target sequence
SSMTRINILKLVAEKPKSITELSNELMMSKGNISSQVAELQNAGLIEISYENGEKGIKKMIKSKYDKIIIVLSESSSGLQESNK

SEQ ID NO: 43521 - protein, 85 aa, unidentified
  REGION 1..85: note = Description of Unknown:cds_NZ_WFIY01000004.1_cds_WP_155863175.1_1106 target sequence
SFSKKFYDMQDFILSRTALEKVKRHVEERKENSIYKWISSELNYFINKYENEPDLKECIKRLKDGISAENYTYILQGSKECIEIL

SEQ ID NO: 43522 - protein, 84 aa, unidentified
  REGION 1..84: note = Description of Unknown:cds_NZ_WFIY01000004.1_cds_WP_155863175.1_1106 target sequence
ALEKVKRHVEERKENSIYKWISSELNYFINKYENEPDLKECIKRLKDGISAENYTYILQGSKECIEILSKKINELYESLMEQDH

SEQ ID NO: 43523 - protein, 85 aa, unidentified
  REGION 1..85: note = Description of Unknown:cds_NZ_WFIY01000004.1_cds_WP_155863221.1_1167 target sequence
PIEELSKVLEEIRKKAYDTKDAVLKDTTRFYTILHNTINSEIVKAKKEGKKIDDIQKEFEDLLKKIDGLREKQKNMSIKDLRNAL

SEQ ID NO: 43524 - protein, 84 aa, unidentified
  REGION 1..84: note = Description of Unknown:cds_NZ_WFIY01000004.1_cds_WP_155863221.1_1167 target sequence
DTKDAVLKDTTRFYTILHNTINSEIVKAKKEGKKIDDIQKEFEDLLKKIDGLREKQKNMSIKDLRNALVSYTQKAEKLIKKIKG

SEQ ID NO: 43525 - protein, 85 aa, unidentified
  REGION 1..85: note = Description of Unknown:cds_NZ_WFIY01000004.1_cds_WP_155864411.1_1203 target sequence
DYSRIPGLLGVYKLQEGKFTKVEGEGINVDVEKLTNIVMENMRIGEEEAEKIGLGSLQGFAMILDDTGFAYINGVLLVVDAIKTN

SEQ ID NO: 43526 - protein, 84 aa, unidentified
  REGION 1..84: note = Description of Unknown:cds_NZ_WFIY01000004.1_cds_WP_155864411.1_1203 target sequence
KFTKVEGEGINVDVEKLTNIVMENMRIGEEEAEKIGLGSLQGFAMILDDTGFAYINGVLLVVDAIKTNWDLVIKTLEGIMYEKS

SEQ ID NO: 43527 - protein, 85 aa, unidentified
  REGION 1..85: note = Description of Unknown:cds_NZ_WFIY01000004.1_cds_WP_155863504.1_1456 target sequence
QKAFIDKNINIQKLVQDLQNSLSIDGWEVRINQYSQNDYLLRGQKKGHFHKVEEILIRVRGDPNNVLITIDEENIGTFGRAWINL

SEQ ID NO: 43528 - protein, 84 aa, unidentified
  REGION 1..84: note = Description of Unknown:cds_NZ_WFIY01000004.1_cds_WP_155863504.1_1456 target sequence
LQNSLSIDGWEVRINQYSQNDYLLRGQKKGHFHKVEEILIRVRGDPNNVLITIDEENIGTFGRAWINLKLLGEIERKVNDGFYS

SEQ ID NO: 43529 - protein, 85 aa, unidentified
  REGION 1..85: note = Description of Unknown:cds_NZ_WFIY01000004.1_cds_WP_155863713.1_1574 target sequence
EPFYFKSYDKVIGIAHNVEELEKEMERLTKDDPAALEYHLKEGHIVAWLNYIGEKGLAEILKGVSKPEEALARIKEYKFLKNSTR

SEQ ID NO: 43530 - protein, 84 aa, unidentified
  REGION 1..84: note = Description of Unknown:cds_NZ_WFIY01000004.1_cds_WP_155863713.1_1574 target sequence
VEELEKEMERLTKDDPAALEYHLKEGHIVAWLNYIGEKGLAEILKGVSKPEEALARIKEYKFLKNSTRMLPKTTSRKEKKLHVR

SEQ ID NO: 43531 - protein, 85 aa, unidentified
  REGION 1..85: note = Description of Unknown:cds_NZ_WFIY01000004.1_cds_WP_155864116.1_2067 target sequence
RSVLFFILGMLLVLSLGFVYSYFFEEQRGITATACVTNFIKESNCKTIIYNPYCFTIHVNYGCHTLTLLPKESTYISNASEIYIS

SEQ ID NO: 43532 - protein, 84 aa, unidentified
  REGION 1..84: note = Description of Unknown:cds_NZ_WFIY01000004.1_cds_WP_155864116.1_2067 target sequence
FVYSYFFEEQRGITATACVTNFIKESNCKTIIYNPYCFTIHVNYGCHTLTLLPKESTYISNASEIYISSPCRPCFLLVVYLKYE

SEQ ID NO: 43533 - protein, 85 aa, unidentified
  REGION 1..85: note = Description of Unknown:cds_NZ_WFIY01000004.1_cds_WP_155864264.1_2256 target sequence
VVAKVLATIGGILTLIAGIVDIATRNPLAHYIYGLNVISGSIMIYLGILGIVAGLMTLYGEYKNDRDFVIAGGALGLATPTEFSL

SEQ ID NO: 43534 - protein, 84 aa, unidentified
  REGION 1..84: note = Description of Unknown:cds_NZ_WFIY01000004.1_cds_WP_155864264.1_2256 target sequence
GIVDIATRNPLAHYIYGLNVISGSIMIYLGILGIVAGLMTLYGEYKNDRDFVIAGGALGLATPTEFSLLSLIGGLLMQKEKVKA

SEQ ID NO: 43535 - protein, 85 aa, unidentified
  REGION 1..85: note = Description of Unknown:cds_NC_005830.1_cds_YP_003753.1_28 target sequence
IVDKNKIVIPMSEFLDSMFLVIEKLGVHAEKKGSMIFLSSERVKLADWKQLGAMCSDCYHCKLPLSSFIEIVTRKAKDKFLVMYN

SEQ ID NO: 43536 - protein, 84 aa, unidentified
  REGION 1..84: note = Description of Unknown:cds_NC_005830.1_cds_YP_003753.1_28 target sequence
MFLVIEKLGVHAEKKGSMIFLSSERVKLADWKQLGAMCSDCYHCKLPLSSFIEIVTRKAKDKFLVMYNEKEVTLVARGVQTIQK

SEQ ID NO: 43537 - protein, 85 aa, unidentified
  REGION 1..85: note = Description of Unknown:hvTR_P16494 target sequence
MSLLTPAVLLTQRSHTLTLSVSTPLGLVMTTYESSTLKDARLKLVSQKEVNGKLHLTLGAGRLLYIIRIFLATGTTQFLTMVLPS

SEQ ID NO: 43538 - protein, 84 aa, unidentified
  REGION 1..84: note = Description of Unknown:hvTR_P16494 target sequence
LTLSVSTPLGLVMTTYESSTLKDARLKLVSQKEVNGKLHLTLGAGRLLYIIRIFLATGTTQFLTMVLPSTASVDSLPGTYLRRC

SEQ ID NO: 43539 - protein, 85 aa, unidentified
  REGION 1..85: note = Description of Unknown:cds_NC_024711.1_cds_YP_009052487.1_4 target sequence
KVHRIITTIEVENDNSITSVELTKLYPASDCILLAITNMTTNGNAEDITKIYDSVNKSRLGIAGKLKGIARIIDNSLDGHDYNVV

SEQ ID NO: 43540 - protein, 84 aa, unidentified
  REGION 1..84: note = Description of Unknown:cds_NC_024711.1_cds_YP_009052487.1_4 target sequence
ITSVELTKLYPASDCILLAITNMTTNGNAEDITKIYDSVNKSRLGIAGKLKGIARIIDNSLDGHDYNVVTDDNSTNEINDDLLL

SEQ ID NO: 43541 - protein, 85 aa, unidentified
  REGION 1..85: note = Description of Unknown:cds_NZ_WFIY01000004.1_cds_WP_155862957.1_820 target sequence
GGKRKKRTKIIKPKPKLPKTFECPRCGRIAISIEIKNGIAHIKCGNCGLSADIEVPPIFDEANAYGKFIDLYLDGKLEIKESNKE

SEQ ID NO: 43542 - protein, 84 aa, unidentified
  REGION 1..84: note = Description of Unknown:cds_NZ_WFIY01000004.1_cds_WP_155862957.1_820 target sequence
LPKTFECPRCGRIAISIEIKNGIAHIKCGNCGLSADIEVPPIFDEANAYGKFIDLYLDGKLEIKESNKEESINEGEDKQVHTTT

SEQ ID NO: 43543 - protein, 85 aa, unidentified
  REGION 1..85: note = Description of Unknown:cds_NZ_WFIY01000004.1_cds_WP_155863181.1_1112 target sequence
ISQYLEELGILLIMLGFLIVFLGILYEAFKPREEGEEKETQAGGVILIGPIPIIFGSSKKIEKWMLIVALVIVIIMALLYLYEAS

SEQ ID NO: 43544 - protein, 84 aa, unidentified
  REGION 1..84: note = Description of Unknown:cds_NZ_WFIY01000004.1_cds_WP_155863181.1_1112 target sequence
FLIVFLGILYEAFKPREEGEEKETQAGGVILIGPIPIIFGSSKKIEKWMLIVALVIVIIMALLYLYEASSLHGINYSLYSNYHG

SEQ ID NO: 43545 - protein, 85 aa, unidentified
  REGION 1..85: note = Description of Unknown:cds_NZ_WFIY01000004.1_cds_WP_155863361.1_1333 target sequence
CWAVPAKVVAIDSDVIAEVDLGGGTIKKVAIGVDNLKPGDYVMVHAGVIIEKLSKEGVIENLKFIAEEIQRTEEIMGKSEEEAKK

SEQ ID NO: 43546 - protein, 84 aa, unidentified
  REGION 1..84: note = Description of Unknown:cds_NZ_WFIY01000004.1_cds_WP_155863361.1_1333 target sequence
AEVDLGGGTIKKVAIGVDNLKPGDYVMVHAGVIIEKLSKEGVIENLKFIAEEIQRTEEIMGKSEEEAKKAADEFFKEAMKILES

SEQ ID NO: 43547 - protein, 85 aa, unidentified
  REGION 1..85: note = Description of Unknown:cds_NZ_WFIY01000004.1_cds_1692 target sequence
LKKRALKLINDAIKLAEEGNLELARKYIMLAREYSNKGRFKIPLEYKRKFCRKCLTPLIPGKTERIRIKSKILVRSCLICGWIRR

SEQ ID NO: 43548 - protein, 84 aa, unidentified
  REGION 1..84: note = Description of Unknown:cds_NZ_WFIY01000004.1_cds_1692 target sequence
EGNLELARKYIMLAREYSNKGRFKIPLEYKRKFCRKCLTPLIPGKTERIRIKSKILVRSCLICGWIRRYDLRKNKESKSGTSNN

SEQ ID NO: 43549 - protein, 85 aa, unidentified
  REGION 1..85: note = Description of Unknown:cds_NZ_WFIY01000004.1_cds_WP_152941819.1_1711 target sequence
NSMKYLVDISVEPIGTNSTSISRYVKLVYEVLKAKGIKFYPAPSMTTLEIDDITQLGYIIKDIDDTLAKEGVKRIVTIMKIDDRR

SEQ ID NO: 43550 - protein, 84 aa, unidentified
  REGION 1..84: note = Description of Unknown:cds_NZ_WFIY01000004.1_cds_WP_152941819.1_1711 target sequence
NSTSISRYVKLVYEVLKAKGIKFYPAPSMTTLEIDDITQLGYIIKDIDDTLAKEGVKRIVTIMKIDDRRDKENSIEHKLEAIKM

SEQ ID NO: 43551 - protein, 85 aa, unidentified
  REGION 1..85: note = Description of Unknown:cds_NZ_WFIY01000004.1_cds_WP_155864098.1_2044 target sequence
NKRDLGWLISGIAGGVGYIIGTFYVIFFRRDEYRWLGLLYLIGPVGSVLMYYMTRKENKELARMSILLLFGFAIWVIIAVSLNIN

SEQ ID NO: 43552 - protein, 84 aa, unidentified
  REGION 1..84: note = Description of Unknown:cds_NZ_WFIY01000004.1_cds_WP_155864098.1_2044 target sequence
GYIIGTFYVIFFRRDEYRWLGLLYLIGPVGSVLMYYMTRKENKELARMSILLLFGFAIWVIIAVSLNINPFYQYFGYIHGWIGD

SEQ ID NO: 43553 - protein, 85 aa, unidentified
  REGION 1..85: note = Description of Unknown:cds_NZ_WFIY01000004.1_cds_WP_155864113.1_2064 target sequence
ALFNKRKRDKYDIYHDILKACKNNVGGINKTRLMYSANLTFEVANKYLPLLEKCGLIIRKDNLYFITNKGEEVLQKLTRFKEIKG

SEQ ID NO: 43554 - protein, 84 aa, unidentified
  REGION 1..84: note = Description of Unknown:cds_NZ_WFIY01000004.1_cds_WP_155864113.1_2064 target sequence
ILKACKNNVGGINKTRLMYSANLTFEVANKYLPLLEKCGLIIRKDNLYFITNKGEEVLQKLTRFKEIKGEMKEIVEKLKEELPH

SEQ ID NO: 43555 - protein, 85 aa, unidentified
  REGION 1..85: note = Description of Unknown:cds_NZ_WFIY01000004.1_cds_WP_155864193.1_2155 target sequence
LANSLPFLSNICGVALEILPCIVETDYQVLTYESRGKGEARTRKNELIKTGIEENYINDFIEGAERIEGDVCGDCKRLELISKFR

SEQ ID NO: 43556 - protein, 84 aa, unidentified
  REGION 1..84: note = Description of Unknown:cds_NZ_WFIY01000004.1_cds_WP_155864193.1_2155 target sequence
ILPCIVETDYQVLTYESRGKGEARTRKNELIKTGIEENYINDFIEGAERIEGDVCGDCKRLELISKFRLIKKERIIIPSRFAFK

SEQ ID NO: 43557 - protein, 85 aa, unidentified
  REGION 1..85: note = Description of Unknown:cds_NZ_WFIY01000004.1_cds_WP_155864342.1_2355 target sequence
ALPPGEYKVLFINNVSKTCVTIQIYIGDGRPYPTGIADYGIQVVNGVVKPYVEKFDEVVAQIYSISAYNASLNNYGASQSSKLIL

SEQ ID NO: 43558 - protein, 84 aa, unidentified
  REGION 1..84: note = Description of Unknown:cds_NZ_WFIY01000004.1_cds_WP_155864342.1_2355 target sequence
KTCVTIQIYIGDGRPYPTGIADYGIQVVNGVVKPYVEKFDEVVAQIYSISAYNASLNNYGASQSSKLILCTAVKNIGYRTSSTS

SEQ ID NO: 43559 - protein, 85 aa, unidentified
  REGION 1..85: note = Description of Unknown:cds_NC_034440.1_cds_YP_009361858.1_4 target sequence
RVQRPPTLLLVVGLTLLALAYSKPLYVPEHCQNYSGRMLRACIRTAQTDTVGLYTNLVIQTGTATFESAVPVDRGSPSTHADTYE

SEQ ID NO: 43560 - protein, 84 aa, unidentified
  REGION 1..84: note = Description of Unknown:cds_NC_034440.1_cds_YP_009361858.1_4 target sequence
LALAYSKPLYVPEHCQNYSGRMLRACIRTAQTDTVGLYTNLVIQTGTATFESAVPVDRGSPSTHADTYELNTSVTLFDVGYSVN

SEQ ID NO: 43561 - protein, 85 aa, unidentified
  REGION 1..85: note = Description of Unknown:cds_NC_003214.2_cds_NP_445693.1_28 target sequence
VMIVTIEKSLYDRLREEAERRETSVSAVLRQLLLNYFNIEDDTKSYRKENVKNVIIRVGEKEYVRLQVHMKKENELIIKNELKRR

SEQ ID NO: 43562 - protein, 84 aa, unidentified
  REGION 1..84: note = Description of Unknown:cds_NC_003214.2_cds_NP_445693.1_28 target sequence
AERRETSVSAVLRQLLLNYFNIEDDTKSYRKENVKNVIIRVGEKEYVRLQVHMKKENELIIKNELKRRGMSVNQLLKNEILLTA

SEQ ID NO: 43563 - protein, 85 aa, unidentified
  REGION 1..85: note = Description of Unknown:cds_NC_029316.1_cds_YP_009230345.1_92 target sequence
WRILFSCMDKLNSIRELLRDLRDLTLASFYILLLTFLLLVSTSSFAFRNAYIKRLNKCNGDYNCIQKAFEWCATESEWKADPARV

SEQ ID NO: 43564 - protein, 84 aa, unidentified
  REGION 1..84: note = Description of Unknown:cds_NC_029316.1_cds_YP_009230345.1_92 target sequence
LLRDLRDLTLASFYILLLTFLLLVSTSSFAFRNAYIKRLNKCNGDYNCIQKAFEWCATESEWKADPARVYNDICLHYYKKLQRK

SEQ ID NO: 43565 - protein, 85 aa, unidentified
  REGION 1..85: note = Description of Unknown:cds_NC_030656.1_cds_YP_009268728.1_13 target sequence
SNSRISQDVEACLKFPNSCCSVCFENEVDGTVTHVGERCTVRFENEVDGTVTTVGEQCTVHFENECEVTNQSGEKKHLWLIGQKP

SEQ ID NO: 43566 - protein, 84 aa, unidentified
  REGION 1..84: note = Description of Unknown:cds_NC_030656.1_cds_YP_009268728.1_13 target sequence
NSCCSVCFENEVDGTVTHVGERCTVRFENEVDGTVTTVGEQCTVHFENECEVTNQSGEKKHLWLIGQKPRGELKDGEFDVEAPN

SEQ ID NO: 43567 - protein, 85 aa, unidentified
  REGION 1..85: note = Description of Unknown:cds_NZ_WFIY01000004.1_cds_WP_155862638.1_419 target sequence
GKILLLGDRYTVSLFRMMGAEGKVVEDPYALEDEIKNVRKMEDVDLVLITKDLYDPVRERLESVISSQTKPLITVIPSPYSEAEP

SEQ ID NO: 43568 - protein, 84 aa, unidentified
  REGION 1..84: note = Description of Unknown:cds_NZ_WFIY01000004.1_cds_WP_155862638.1_419 target sequence
RMMGAEGKVVEDPYALEDEIKNVRKMEDVDLVLITKDLYDPVRERLESVISSQTKPLITVIPSPYSEAEPMDVRKLILRALGFG

SEQ ID NO: 43569 - protein, 85 aa, unidentified
  REGION 1..85: note = Description of Unknown:cds_NZ_WFIY01000004.1_cds_WP_155862666.1_460 target sequence
QFCPKCGGVMVPVKKDGKEVLKCKKCGYEKEMSTKDKKAYEIKETAKNNKVLTTSIVSEKEGRKRDEEEWEQEREEYYKEIGLEL

SEQ ID NO: 43570 - protein, 84 aa, unidentified
  REGION 1..84: note = Description of Unknown:cds_NZ_WFIY01000004.1_cds_WP_155862666.1_460 target sequence
DGKEVLKCKKCGYEKEMSTKDKKAYEIKETAKNNKVLTTSIVSEKEGRKRDEEEWEQEREEYYKEIGLELLRDEFEGSEENDED

SEQ ID NO: 43571 - protein, 85 aa, unidentified
  REGION 1..85: note = Description of Unknown:cds_NZ_WFIY01000004.1_cds_WP_152939917.1_928 target sequence
ADNLCGGLPPDICEQLNKEEQFIKIKLEKRRYGKEVTVIEGISSNDADLKKIASELKSKLAAGGTVKNGRIEIQGDHREKVKDIL

SEQ ID NO: 43572 - protein, 84 aa, unidentified
  REGION 1..84: note = Description of Unknown:cds_NZ_WFIY01000004.1_cds_WP_152939917.1_928 target sequence
LNKEEQFIKIKLEKRRYGKEVTVIEGISSNDADLKKIASELKSKLAAGGTVKNGRIEIQGDHREKVKDILVKLGFPAENIMVIE

SEQ ID NO: 43573 - protein, 85 aa, unidentified
  REGION 1..85: note = Description of Unknown:cds_NC_009884.1_cds_YP_001496929.1_4 target sequence
IITIEEEVYNNLKKRAEKEEISIPAIVRKFIVSYFNLEDSTKDYKRKEPGESVIIVNGKKYFRINCKMERQNELYIKSELKKKGI

SEQ ID NO: 43574 - protein, 84 aa, unidentified
  REGION 1..84: note = Description of Unknown:cds_NC_009884.1_cds_YP_001496929.1_4 target sequence
AEKEEISIPAIVRKFIVSYFNLEDSTKDYKRKEPGESVIIVNGKKYFRINCKMERQNELYIKSELKKKGISVNKLLKELIIVTV

SEQ ID NO: 43575 - protein, 85 aa, unidentified
  REGION 1..85: note = Description of Unknown:cds_NC_009884.1_cds_YP_001496951.1_26 target sequence
PLDNSFPLSQLSKVSERVLEIHLELLDTKSKLNDIYKDICELQRFTEQLINDDDLRESYVSSKPELSKNWEKLKKEIEQKHKEIQ

SEQ ID NO: 43576 - protein, 84 aa, unidentified
  REGION 1..84: note = Description of Unknown:cds_NC_009884.1_cds_YP_001496951.1_26 target sequence
ERVLEIHLELLDTKSKLNDIYKDICELQRFTEQLINDDDLRESYVSSKPELSKNWEKLKKEIEQKHKEIQELISEFDNMFINSF

SEQ ID NO: 43577 - protein, 85 aa, unidentified
  REGION 1..85: note = Description of Unknown:cds_NC_007409.1_cds_YP_319857.1_26 target sequence
EEAQPKLEKLEKFEYFLVNKLEEKIKETLIVENEVVRIVMIQRPIYDPFDKKFHTRGLLKIGKKYYTIVIEASKYFIFIKSKPIY

SEQ ID NO: 43578 - protein, 84 aa, unidentified
  REGION 1..84: note = Description of Unknown:cds_NC_007409.1_cds_YP_319857.1_26 target sequence
FLVNKLEEKIKETLIVENEVVRIVMIQRPIYDPFDKKFHTRGLLKIGKKYYTIVIEASKYFIFIKSKPIYLRIGWDELEEGEKQ

SEQ ID NO: 43579 - protein, 85 aa, unidentified
  REGION 1..85: note = Description of Unknown:cds_NC_038931.1_cds_YP_009509129.1_13 target sequence
RVYTIRDDRIVYLGEYELVPMPKLEDDIAAIKGSIIAYVLNSNYSSFIGALKDTKEMELIENLAYELHQNIDRTPTLTRYYYLLM

SEQ ID NO: 43580 - protein, 84 aa, unidentified
  REGION 1..84: note = Description of Unknown:cds_NC_038931.1_cds_YP_009509129.1_13 target sequence
EYELVPMPKLEDDIAAIKGSIIAYVLNSNYSSFIGALKDTKEMELIENLAYELHQNIDRTPTLTRYYYLLMKVYGMHGSILSQF

SEQ ID NO: 43581 - protein, 85 aa, unidentified
  REGION 1..85: note = Description of Unknown:cds_NZ_WFIY01000004.1_cds_WP_155862470.1_225 target sequence
SSRRRKKKESDDTEEVENKLKVVYSDKDVVVMTAPNEEELKQILLDLLSEKPMNLKELHSKLSGIASEDKIRRALASLTEKGQVT

SEQ ID NO: 43582 - protein, 84 aa, unidentified
  REGION 1..84: note = Description of Unknown:cds_NZ_WFIY01000004.1_cds_WP_155862470.1_225 target sequence
EVENKLKVVYSDKDVVVMTAPNEEELKQILLDLLSEKPMNLKELHSKLSGIASEDKIRRALASLTEKGQVTLLEDGRYAKLGTE

SEQ ID NO: 43583 - protein, 85 aa, unidentified
  REGION 1..85: note = Description of Unknown:cds_NZ_WFIY01000004.1_cds_WP_048054620.1_464 target sequence
RAVMKGRDLEGLAFLGKVESVNVEFCDDKKTLAKVVVKTTDGDEVESECIPVRAAGKISIVIKHYLRMGIGKYIITNEKTVGNVD

SEQ ID NO: 43584 - protein, 84 aa, unidentified
  REGION 1..84: note = Description of Unknown:cds_NZ_WFIY01000004.1_cds_WP_048054620.1_464 target sequence
LGKVESVNVEFCDDKKTLAKVVVKTTDGDEVESECIPVRAAGKISIVIKHYLRMGIGKYIITNEKTVGNVDTEGEDETEDRQTS

SEQ ID NO: 43585 - protein, 85 aa, unidentified
  REGION 1..85: note = Description of Unknown:cds_NZ_WFIY01000004.1_cds_WP_152940119.1_790 target sequence
VSHSKGNRTRSRNLLKKSPRERGAIPSLSSLMYDYKPGDKVIIKINSAIHNGMPHRRFQGRVAEVVGKRGRAYELKLRVGNKEKL

SEQ ID NO: 43586 - protein, 84 aa, unidentified
  REGION 1..84: note = Description of Unknown:cds_NZ_WFIY01000004.1_cds_WP_152940119.1_790 target sequence
LKKSPRERGAIPSLSSLMYDYKPGDKVIIKINSAIHNGMPHRRFQGRVAEVVGKRGRAYELKLRVGNKEKLIIVRPEHLRLFKQ

SEQ ID NO: 43587 - protein, 85 aa, unidentified
  REGION 1..85: note = Description of Unknown:cds_NZ_WFIY01000004.1_cds_WP_155863089.1_1002 target sequence
EFFLGNFIAIFLHFRNVDVEDKILLVRGILGAIAGVISAFSNSFIYAVIIVLVSYIISIPIVTFYFKIKKNWLVFGKGSLTLAIA

SEQ ID NO: 43588 - protein, 84 aa, unidentified
  REGION 1..84: note = Description of Unknown:cds_NZ_WFIY01000004.1_cds_WP_155863089.1_1002 target sequence
RNVDVEDKILLVRGILGAIAGVISAFSNSFIYAVIIVLVSYIISIPIVTFYFKIKKNWLVFGKGSLTLAIAWFLILVSVYNVFG

SEQ ID NO: 43589 - protein, 85 aa, unidentified
  REGION 1..85: note = Description of Unknown:cds_NZ_WFIY01000004.1_cds_WP_155863640.1_1529 target sequence
LDIFNLKDTKSNLNFSQFVGYFSGGLYWVKEGPLAIAEFLAPVFFLLFKLPIIILNPLTYILAYTPYLLFSIALFIYAIKGKGEY

SEQ ID NO: 43590 - protein, 84 aa, unidentified
  REGION 1..84: note = Description of Unknown:cds_NZ_WFIY01000004.1_cds_WP_155863640.1_1529 target sequence
SQFVGYFSGGLYWVKEGPLAIAEFLAPVFFLLFKLPIIILNPLTYILAYTPYLLFSIALFIYAIKGKGEYGIKRVLLPSIGRIS

SEQ ID NO: 43591 - protein, 85 aa, unidentified
  REGION 1..85: note = Description of Unknown:cds_NC_003214.2_cds_NP_445680.1_15 target sequence
VDVETVETKYKIILDTQSNYVLMEGRLKVEVRIKGKPIIYEVQEVRNMGYLIDITELDIADTKQRIDSKLCERRYKYVNSLKNLE

SEQ ID NO: 43592 - protein, 84 aa, unidentified
  REGION 1..84: note = Description of Unknown:cds_NC_003214.2_cds_NP_445680.1_15 target sequence
DTQSNYVLMEGRLKVEVRIKGKPIIYEVQEVRNMGYLIDITELDIADTKQRIDSKLCERRYKYVNSLKNLEKFINFVGAEIEVK

SEQ ID NO: 43593 - protein, 85 aa, unidentified
  REGION 1..85: note = Description of Unknown:cds_NC_005830.1_cds_YP_003728.1_3 target sequence
VDTHEFHKLLIKVVDLFLEDRIKEFELKLNTTLDELEFEELIGKPDSSNSAENNGIFIDEYSYDASENAIKKLFVEYVRQPEFKY

SEQ ID NO: 43594 - protein, 84 aa, unidentified
  REGION 1..84: note = Description of Unknown:cds_NC_005830.1_cds_YP_003728.1_3 target sequence
LFLEDRIKEFELKLNTTLDELEFEELIGKPDSSNSAENNGIFIDEYSYDASENAIKKLFVEYVRQPEFKYTVLSIKGVNDWVRE

SEQ ID NO: 43595 - protein, 85 aa, unidentified
  REGION 1..85: note = Description of Unknown:cds_NC_043030.1_cds_YP_009664544.1_9 target sequence
LKVAEPLKLAIIFFFIVIVYYGLLFDLVVDMLNQAVSLIDSYGLLTVNVPMKDWDPANQVWVDSSKQVNLSGVAQALANLLAYAA

SEQ ID NO: 43596 - protein, 84 aa, unidentified
  REGION 1..84: note = Description of Unknown:cds_NC_043030.1_cds_YP_009664544.1_9 target sequence
IVIVYYGLLFDLVVDMLNQAVSLIDSYGLLTVNVPMKDWDPANQVWVDSSKQVNLSGVAQALANLLAYAAPFIPFISFMRRRIF

SEQ ID NO: 43597 - protein, 85 aa, unidentified
  REGION 1..85: note = Description of Unknown:hvTR_C7B7D3 target sequence
KGDRVTIKDVELHLEELVIPANLLSDESLSLDETPEEEQLSPYRVDSLCTRCNKCIRISVVCTTGAIYTLEQLLLSTELSFLCAG

SEQ ID NO: 43598 - protein, 84 aa, unidentified
  REGION 1..84: note = Description of Unknown:hvTR_C7B7D3 target sequence
LEELVIPANLLSDESLSLDETPEEEQLSPYRVDSLCTRCNKCIRISVVCTTGAIYTLEQLLLSTELSFLCAGCSRTTVRNGRRF

SEQ ID NO: 43599 - protein, 85 aa, unidentified
  REGION 1..85: note = Description of Unknown:hvTR_P03129 target sequence
HGDTPTLHEYMLDLQPETTDLYCYEQLNDSSEEEDEIDGPAGQAEPDRAHYNIVTFCCKCDSTLRLCVQSTHVDIRTLEDLLMGT

SEQ ID NO: 43600 - protein, 84 aa, unidentified
  REGION 1..84: note = Description of Unknown:hvTR_P03129 target sequence
LQPETTDLYCYEQLNDSSEEEDEIDGPAGQAEPDRAHYNIVTFCCKCDSTLRLCVQSTHVDIRTLEDLLMGTLGIVCPICSQKP

SEQ ID NO: 43601 - protein, 85 aa, unidentified
  REGION 1..85: note = Description of Unknown:vpeps_3DF6_1 target sequence
GDTHEFHKLLIKVVDLFLEDRIKEFEMKLNTTLDELEFEELIGKPDSSNSAENNGIFIDEYSYDASENAMKKLFVEYVRQPEFKY

SEQ ID NO: 43602 - protein, 85 aa, unidentified
  REGION 1..85: note = Description of Unknown:vpeps_3DF6_1 target sequence
DLFLEDRIKEFEMKLNTTLDELEFEELIGKPDSSNSAENNGIFIDEYSYDASENAMKKLFVEYVRQPEFKYTVLSIKGVNDWVRE

SEQ ID NO: 43603 - protein, 85 aa, unidentified
  REGION 1..85: note = Description of Unknown:vpeps_3DJW_1 target sequence
GDTHEFHKLLIKVVDLFLEDRIKEFELKLNTTLDELEFEELIGKPDSSNSAENNGIFIDEYSYDASENAIKKLFVEYVRQPEFKY

SEQ ID NO: 43604 - protein, 85 aa, unidentified
  REGION 1..85: note = Description of Unknown:vpeps_3DJW_1 target sequence
DLFLEDRIKEFELKLNTTLDELEFEELIGKPDSSNSAENNGIFIDEYSYDASENAIKKLFVEYVRQPEFKYTVLSIKGVNDWVRE

SEQ ID NO: 43605 - protein, 85 aa, unidentified
  REGION 1..85: note = Description of Unknown:vpeps_2CO5_1 target sequence
KIRKYMRINYYIILKVLVINGSRLEKKRLRSEILKRFDIDISDGVLYPLIDSLIDDKILREEEAPDGKVLFLTEKGMKEFEELHE

SEQ ID NO: 43606 - protein, 85 aa, unidentified
  REGION 1..85: note = Description of Unknown:vpeps_2CO5_1 target sequence
LKVLVINGSRLEKKRLRSEILKRFDIDISDGVLYPLIDSLIDDKILREEEAPDGKVLFLTEKGMKEFEELHEFFKKIVCHHHHHH

SEQ ID NO: 43607 - protein, 85 aa, unidentified
  REGION 1..85: note = Description of Unknown:vpeps_1TBX_1 target sequence
KSTPFFYPEAIVLAYLYDNEGIATYDLYKKVNAEFPMSTATFYDAKKFLIQEGFVKERQERGEKRLYLTEKGKLFAISLKTAIET

SEQ ID NO: 43608 - protein, 85 aa, unidentified
  REGION 1..85: note = Description of Unknown:vpeps_1TBX_1 target sequence
AYLYDNEGIATYDLYKKVNAEFPMSTATFYDAKKFLIQEGFVKERQERGEKRLYLTEKGKLFAISLKTAIETYKQIKKRHHHHHH

SEQ ID NO: 43609 - protein, 63 aa, unidentified
  REGION 1..63: note = Description of Unknown:cds_NZ_WFIY01000004.1_cds_75 target sequence
ISVRLVVVSVSVIKVLDKEEYERWIISAKQTLESARSDLNSGFYNWACFKLQQAAEFAVYGIG

SEQ ID NO: 43610 - protein, 50 aa, unidentified
  REGION 1..50: note = Description of Unknown:cds_NZ_WFIY01000004.1_cds_75 target sequence
KVLDKEEYERWIISAKQTLESARSDLNSGFYNWACFKLQQAAEFAVYGIG

SEQ ID NO: 43611 - protein, 85 aa, unidentified
  REGION 1..85: note = Description of Unknown:cds_NZ_WFIY01000004.1_cds_WP_048054665.1_188 target sequence
STTTPTPSNVVLVGKKPVMNYVLAALTLLNQGVPEIVIKARGRAISKAVDTVEIVRNRFLPDKIEIKSIGIGSQVVTSQDGRQSR

SEQ ID NO: 43612 - protein, 84 aa, unidentified
  REGION 1..84: note = Description of Unknown:cds_NZ_WFIY01000004.1_cds_WP_048054665.1_188 target sequence
GKKPVMNYVLAALTLLNQGVPEIVIKARGRAISKAVDTVEIVRNRFLPDKIEIKSIGIGSQVVTSQDGRQSRVSTIEVTIRKKA

SEQ ID NO: 43613 - protein, 85 aa, unidentified
  REGION 1..85: note = Description of Unknown:cds_NZ_WFIY01000004.1_cds_WP_155862679.1_475 target sequence
SERERKEVKKLFKFLFFTSRGGLTRLRIIRLLEDSSLNANQISTLLRMDYKTIMHHLEVLTQNGIIIKDGEKYGAVYRLTSFYYR

SEQ ID NO: 43614 - protein, 84 aa, unidentified
  REGION 1..84: note = Description of Unknown:cds_NZ_WFIY01000004.1_cds_WP_155862679.1_475 target sequence
FLFFTSRGGLTRLRIIRLLEDSSLNANQISTLLRMDYKTIMHHLEVLTQNGIIIKDGEKYGAVYRLTSFYYRFKDVLEELEKEG

SEQ ID NO: 43615 - protein, 85 aa, unidentified
  REGION 1..85: note = Description of Unknown:cds_NZ_WFIY01000004.1_cds_WP_152942062.1_1836 target sequence
KVILNVIRQNEHVFVNVCEKELLGKEFKNDKVILNVNKEFYGGDEVDMEYAFSLFNEATVVSIVGNYLVEEAIRRGYVHKNAILE

SEQ ID NO: 43616 - protein, 84 aa, unidentified
  REGION 1..84: note = Description of Unknown:cds_NZ_WFIY01000004.1_cds_WP_152942062.1_1836 target sequence
FVNVCEKELLGKEFKNDKVILNVNKEFYGGDEVDMEYAFSLFNEATVVSIVGNYLVEEAIRRGYVHKNAILEVAGVKFAQVYNL

SEQ ID NO: 43617 - protein, 85 aa, unidentified
  REGION 1..85: note = Description of Unknown:cds_NC_003214.2_cds_NP_445735.1_70 target sequence
RLFSFKGRRKKKSLFVQSEAEIPIKIMVAIGKRHAVGIAELGDQSATVEKTFLPFFKPPEPEEIAKMLLSKLGIPENEWEEILKN

SEQ ID NO: 43618 - protein, 84 aa, unidentified
  REGION 1..84: note = Description of Unknown:cds_NC_003214.2_cds_NP_445735.1_70 target sequence
LFVQSEAEIPIKIMVAIGKRHAVGIAELGDQSATVEKTFLPFFKPPEPEEIAKMLLSKLGIPENEWEEILKNKTELQTNETFWR

SEQ ID NO: 43619 - protein, 85 aa, unidentified
  REGION 1..85: note = Description of Unknown:cds_NC_030656.1_cds_YP_009268837.1_122 target sequence
ADEDIGIPEMYPTVKDDTFYGGSKSSDGLEFIGGAPDRLSLLEKTVTDLLDTYKDLIKCTGAAEERMRRLEGHAASLRASILHLT

SEQ ID NO: 43620 - protein, 84 aa, unidentified
  REGION 1..84: note = Description of Unknown:cds_NC_030656.1_cds_YP_009268837.1_122 target sequence
VKDDTFYGGSKSSDGLEFIGGAPDRLSLLEKTVTDLLDTYKDLIKCTGAAEERMRRLEGHAASLRASILHLTHKIDVQTGFKSK

SEQ ID NO: 43621 - protein, 85 aa, unidentified
  REGION 1..85: note = Description of Unknown:cds_NC_007409.1_cds_YP_319850.1_19 target sequence
DYVSTKKIKWLDEITGTFTDEEYAKAVEFYKFLVSLSAQNKGILQIEWEKLIDLASSYMKVEPIEAFRIIKKMHAYGWIKMIDKR

SEQ ID NO: 43622 - protein, 84 aa, unidentified
  REGION 1..84: note = Description of Unknown:cds_NC_007409.1_cds_YP_319850.1_19 target sequence
ITGTFTDEEYAKAVEFYKFLVSLSAQNKGILQIEWEKLIDLASSYMKVEPIEAFRIIKKMHAYGWIKMIDKRFIILNLERLRES

SEQ ID NO: 43623 - protein, 85 aa, unidentified
  REGION 1..85: note = Description of Unknown:cds_NC_007409.1_cds_YP_319867.1_36 target sequence
QSAESGLLILPPNLMQRRVLKIKRILSYSRDTKVSHKVVLAYFRKHYWLIANGFCPYCHNHYRTFGILANHIMRSHTLEVAEDYF

SEQ ID NO: 43624 - protein, 84 aa, unidentified
  REGION 1..84: note = Description of Unknown:cds_NC_007409.1_cds_YP_319867.1_36 target sequence
LMQRRVLKIKRILSYSRDTKVSHKVVLAYFRKHYWLIANGFCPYCHNHYRTFGILANHIMRSHTLEVAEDYFKLREKIKERGRK

SEQ ID NO: 43625 - protein, 85 aa, unidentified
  REGION 1..85: note = Description of Unknown:hvTR_Q66003 target sequence
MSHPQVQMDLILMQGMWTSVLNMENQLTLLQLGSSSSMPQRPRLLSRVSQRGKLILNLASGRWRLSIIIFQQTGTIQLVTTILPS

SEQ ID NO: 43626 - protein, 84 aa, unidentified
  REGION 1..84: note = Description of Unknown:hvTR_Q66003 target sequence
MQGMWTSVLNMENQLTLLQLGSSSSMPQRPRLLSRVSQRGKLILNLASGRWRLSIIIFQQTGTIQLVTTILPSTASQDTLPDGS

SEQ ID NO: 43627 - protein, 85 aa, unidentified
  REGION 1..85: note = Description of Unknown:cds_NZ_WFIY01000004.1_cds_WP_155862346.1_77 target sequence
ELEKLIKLLKDNKALNVSVRLGILLGLYYTRYAWFKELLEATRLNKAELYQHLKVLHREGYIDIKYVPTVKGKRVKVLITKKGEE

SEQ ID NO: 43628 - protein, 84 aa, unidentified
  REGION 1..84: note = Description of Unknown:cds_NZ_WFIY01000004.1_cds_WP_155862346.1_77 target sequence
KALNVSVRLGILLGLYYTRYAWFKELLEATRLNKAELYQHLKVLHREGYIDIKYVPTVKGKRVKVLITKKGEEVVKQYLELLGG

SEQ ID NO: 43629 - protein, 85 aa, unidentified
  REGION 1..85: note = Description of Unknown:cds_NZ_WFIY01000004.1_cds_WP_155863000.1_877 target sequence
SDDYENKEEEEPKEEKEEKTEEEEEELPALTLQDIELLMKNTEVWDELIAGKITIEQAKKLFEENYEELVNSQKKKTVRKKTTKS

SEQ ID NO: 43630 - protein, 84 aa, unidentified
  REGION 1..84: note = Description of Unknown:cds_NZ_WFIY01000004.1_cds_WP_155863000.1_877 target sequence
KEEKEEKTEEEEEELPALTLQDIELLMKNTEVWDELIAGKITIEQAKKLFEENYEELVNSQKKKTVRKKTTKSKKTKVKEEEEE

SEQ ID NO: 43631 - protein, 85 aa, unidentified
  REGION 1..85: note = Description of Unknown:cds_NZ_WFIY01000004.1_cds_WP_155863274.1_1229 target sequence
EKKNEFDRLLWNPDIAPAKVKNWGYLPLLGVWASIAAPNSMLVGSVGILFGFNIIQVILISLLGDLITLIPLIIQSHGAVKYGLA

SEQ ID NO: 43632 - protein, 84 aa, unidentified
  REGION 1..84: note = Description of Unknown:cds_NZ_WFIY01000004.1_cds_WP_155863274.1_1229 target sequence
PDIAPAKVKNWGYLPLLGVWASIAAPNSMLVGSVGILFGFNIIQVILISLLGDLITLIPLIIQSHGAVKYGLAEPQLDRTRFGI

SEQ ID NO: 43633 - protein, 85 aa, unidentified
  REGION 1..85: note = Description of Unknown:cds_NZ_WFIY01000004.1_cds_WP_155863369.1_1341 target sequence
IGNPSDWVIIIIVALILFFGTSKIPELFRSMGRAIGEFKKGRLEAEMEMQQMQQPSNAAVTQQGDKVAELQKQIEELQKQLEQLK

SEQ ID NO: 43634 - protein, 84 aa, unidentified
  REGION 1..84: note = Description of Unknown:cds_NZ_WFIY01000004.1_cds_WP_155863369.1_1341 target sequence
VALILFFGTSKIPELFRSMGRAIGEFKKGRLEAEMEMQQMQQPSNAAVTQQGDKVAELQKQIEELQKQLEQLKKQQEVQTQKQQ

SEQ ID NO: 43635 - protein, 85 aa, unidentified
  REGION 1..85: note = Description of Unknown:cds_NZ_WFIY01000004.1_cds_2046 target sequence
VINVGLYYRVKEGHEKEFEEIFKKVVETLKSANVGFIDGKLYKNVDNPREYLIYSEWKDLDSFRKFMLSKEFKNTTDYGKQIIEG

SEQ ID NO: 43636 - protein, 84 aa, unidentified
  REGION 1..84: note = Description of Unknown:cds_NZ_WFIY01000004.1_cds_2046 target sequence
HEKEFEEIFKKVVETLKSANVGFIDGKLYKNVDNPREYLIYSEWKDLDSFRKFMLSKEFKNTTDYGKQIIEGRPYHRIFQEINA

SEQ ID NO: 43637 - protein, 85 aa, unidentified
  REGION 1..85: note = Description of Unknown:cds_NZ_WFIY01000004.1_cds_WP_155864280.1_2273 target sequence
INVGLYYRVKEGHEKEFEEAFSKVVSILKNSDIGFIDAKLYKRVDDPREYLIYSEWKDLESFRKFILSKDYKETTTYGKTILEGR

SEQ ID NO: 43638 - protein, 84 aa, unidentified
  REGION 1..84: note = Description of Unknown:cds_NZ_WFIY01000004.1_cds_WP_155864280.1_2273 target sequence
HEKEFEEAFSKVVSILKNSDIGFIDAKLYKRVDDPREYLIYSEWKDLESFRKFILSKDYKETTTYGKTILEGRPYHKIFQEINA

SEQ ID NO: 43639 - protein, 85 aa, unidentified
  REGION 1..85: note = Description of Unknown:cds_NZ_WFIY01000004.1_cds_WP_155864298.1_2291 target sequence
SIPKLIILGGFLLLLVLSIIPSHSFLVFIKKASFKGNIADPYGFIEYKGNLLEFFFNFSLTIYNPTFLTTITKYLSNVTLRIYTT

SEQ ID NO: 43640 - protein, 84 aa, unidentified
  REGION 1..84: note = Description of Unknown:cds_NZ_WFIY01000004.1_cds_WP_155864298.1_2291 target sequence
LLLVLSIIPSHSFLVFIKKASFKGNIADPYGFIEYKGNLLEFFFNFSLTIYNPTFLTTITKYLSNVTLRIYTTYNGKVFYKTGG

SEQ ID NO: 43641 - protein, 85 aa, unidentified
  REGION 1..85: note = Description of Unknown:cds_NC_035460.1_cds_YP_009408063.1_112 target sequence
FIDDKCIILYSNWKITWSLYDNKNKTFILYPTNKSFKYLDSYTIDNSINRIICINPSASELLQVCIYIKDVKWNGSLSILFEDDN

SEQ ID NO: 43642 - protein, 84 aa, unidentified
  REGION 1..84: note = Description of Unknown:cds_NC_035460.1_cds_YP_009408063.1_112 target sequence
WKITWSLYDNKNKTFILYPTNKSFKYLDSYTIDNSINRIICINPSASELLQVCIYIKDVKWNGSLSILFEDDNKAPPFYIVNDN

SEQ ID NO: 43643 - protein, 85 aa, unidentified
  REGION 1..85: note = Description of Unknown:cds_NC_003214.2_cds_NP_445670.1_5 target sequence
VINMIKKIVITTIDSPADDKNIKFLVGLAKLIGKNEISFGEDKILKRDISKNDELREIVKEIIEKYKEKVPNIVKFKEGKIKSDG

SEQ ID NO: 43644 - protein, 84 aa, unidentified
  REGION 1..84: note = Description of Unknown:cds_NC_003214.2_cds_NP_445670.1_5 target sequence
DSPADDKNIKFLVGLAKLIGKNEISFGEDKILKRDISKNDELREIVKEIIEKYKEKVPNIVKFKEGKIKSDGKIIIRWEYENKS

SEQ ID NO: 43645 - protein, 85 aa, unidentified
  REGION 1..85: note = Description of Unknown:hvTR_P05928 target sequence
EQAPEDQGPQREPHNEWTLELLEELKNEAVRHFPRIWLHGLGQHIYETYGDTWAGVEAIIRILQQLLFIHFRIGCRHSRIGVTQQ

SEQ ID NO: 43646 - protein, 84 aa, unidentified
  REGION 1..84: note = Description of Unknown:hvTR_P05928 target sequence
EPHNEWTLELLEELKNEAVRHFPRIWLHGLGQHIYETYGDTWAGVEAIIRILQQLLFIHFRIGCRHSRIGVTQQRRARNGASRS

SEQ ID NO: 43647 - protein, 85 aa, unidentified
  REGION 1..85: note = Description of Unknown:vpeps_2X5H_1 target sequence
GMASLKEIIDELGKQAKEQNKIASRIMKIKGIKRIVVQLNAVPQDGKIRYSMTIHSQNNFRKQIGITPQDAEDLKLIAEFLEKYS

SEQ ID NO: 43648 - protein, 85 aa, unidentified
  REGION 1..85: note = Description of Unknown:vpeps_2X5H_1 target sequence
GKQAKEQNKIASRIMKIKGIKRIVVQLNAVPQDGKIRYSMTIHSQNNFRKQIGITPQDAEDLKLIAEFLEKYSDFLNEYVKFTPR

SEQ ID NO: 43649 - protein, 85 aa, unidentified
  REGION 1..85: note = Description of Unknown:cds_NZ_WFIY01000004.1_cds_WP_013776203.1_195 target sequence
KIKVDDQLIEKLQRLALVEINDNEKEIIKNDISKILEFFNKINELNLENVDPLFHPIPQGKLRKDEIKTPLDRDSALQNVKRKEN

SEQ ID NO: 43650 - protein, 84 aa, unidentified
  REGION 1..84: note = Description of Unknown:cds_NZ_WFIY01000004.1_cds_WP_013776203.1_195 target sequence
LQRLALVEINDNEKEIIKNDISKILEFFNKINELNLENVDPLFHPIPQGKLRKDEIKTPLDRDSALQNVKRKENGYIIGPSTVE

SEQ ID NO: 43651 - protein, 85 aa, unidentified
  REGION 1..85: note = Description of Unknown:cds_NZ_WFIY01000004.1_cds_WP_155862488.1_244 target sequence
NLCEICEEKEAKYSCKLCGRKACEDDFVKEKGICRVCEISLCQICHQHLSLGYCEICGRLICDECTAYFDGSRRICKECYSKKVS

SEQ ID NO: 43652 - protein, 84 aa, unidentified
  REGION 1..84: note = Description of Unknown:cds_NZ_WFIY01000004.1_cds_WP_155862488.1_244 target sequence
KYSCKLCGRKACEDDFVKEKGICRVCEISLCQICHQHLSLGYCEICGRLICDECTAYFDGSRRICKECYSKKVSSKIISSVSQA

SEQ ID NO: 43653 - protein, 85 aa, unidentified
  REGION 1..85: note = Description of Unknown:cds_NZ_WFIY01000004.1_cds_WP_013775970.1_427 target sequence
LPKKRENRGRRKGDKGHVGYVTCDNCGARVPEDKAICVTRMYSPVDAALASELEKKGAIIPKYPVRKCYCINCAIHFGIVKIRAE

SEQ ID NO: 43654 - protein, 84 aa, unidentified
  REGION 1..84: note = Description of Unknown:cds_NZ_WFIY01000004.1_cds_WP_013775970.1_427 target sequence
GDKGHVGYVTCDNCGARVPEDKAICVTRMYSPVDAALASELEKKGAIIPKYPVRKCYCINCAIHFGIVKIRAEEERKTKPTTYF

SEQ ID NO: 43655 - protein, 85 aa, unidentified
  REGION 1..85: note = Description of Unknown:cds_NZ_WFIY01000004.1_cds_WP_155862997.1_874 target sequence
PAIEVGRICVKIRGKDAGKKCVIVDIIDNNFVLVTGPKKITGVKRKRSNILHLEPTDKKIDIQKGASDDEVEKKLQEAGLIDFMK

SEQ ID NO: 43656 - protein, 84 aa, unidentified
  REGION 1..84: note = Description of Unknown:cds_NZ_WFIY01000004.1_cds_WP_155862997.1_874 target sequence
IRGKDAGKKCVIVDIIDNNFVLVTGPKKITGVKRKRSNILHLEPTDKKIDIQKGASDDEVEKKLQEAGLIDFMKEKVKIKIPVI

SEQ ID NO: 43657 - protein, 85 aa, unidentified
  REGION 1..85: note = Description of Unknown:cds_NZ_WFIY01000004.1_cds_WP_155863169.1_1099 target sequence
FEIWYIHITLAIISVIVSILILAEFYKLKKEFNKSKVFSVLLAVSILLTLDSISDLFAFSMWSSNRNPVIIYPSLAISVFTTLSI

SEQ ID NO: 43658 - protein, 84 aa, unidentified
  REGION 1..84: note = Description of Unknown:cds_NZ_WFIY01000004.1_cds_WP_155863169.1_1099 target sequence
IISVIVSILILAEFYKLKKEFNKSKVFSVLLAVSILLTLDSISDLFAFSMWSSNRNPVIIYPSLAISVFTTLSIILIYYYITRV

SEQ ID NO: 43659 - protein, 85 aa, unidentified
  REGION 1..85: note = Description of Unknown:cds_NZ_WFIY01000004.1_cds_WP_155863461.1_1425 target sequence
HKELALTYLKLAMESNDDVISVSFLLKSLEEYALYKIGKDYYSPEIQEEIINYIRSDKSIYSIYSSIIDEMFSVLLGSKMKRELV

SEQ ID NO: 43660 - protein, 84 aa, unidentified
  REGION 1..84: note = Description of Unknown:cds_NZ_WFIY01000004.1_cds_WP_155863461.1_1425 target sequence
AMESNDDVISVSFLLKSLEEYALYKIGKDYYSPEIQEEIINYIRSDKSIYSIYSSIIDEMFSVLLGSKMKRELVEKVMRKIIED

SEQ ID NO: 43661 - protein, 85 aa, unidentified
  REGION 1..85: note = Description of Unknown:cds_NZ_WFIY01000004.1_cds_WP_155863709.1_1568 target sequence
EITVFNKDLQKRINDAIYNISALAVSNRSARKDLLRLRKELKILRKIIQKDYISYEDIITIKGEFGVILISLYILSQKYKRIKNQ

SEQ ID NO: 43662 - protein, 84 aa, unidentified
  REGION 1..84: note = Description of Unknown:cds_NZ_WFIY01000004.1_cds_WP_155863709.1_1568 target sequence
RINDAIYNISALAVSNRSARKDLLRLRKELKILRKIIQKDYISYEDIITIKGEFGVILISLYILSQKYKRIKNQLEHIQDLLLS

SEQ ID NO: 43663 - protein, 85 aa, unidentified
  REGION 1..85: note = Description of Unknown:cds_NZ_WFIY01000004.1_cds_WP_155863772.1_1648 target sequence
KLSSKALEKLKSYGNYSISENGNDIIISYTTPSLLDASGIEGENFRIVEIHCKKDNEGNLQILYAEIKNESNEVIRKMDLDELGL

SEQ ID NO: 43664 - protein, 84 aa, unidentified
  REGION 1..84: note = Description of Unknown:cds_NZ_WFIY01000004.1_cds_WP_155863772.1_1648 target sequence
SYGNYSISENGNDIIISYTTPSLLDASGIEGENFRIVEIHCKKDNEGNLQILYAEIKNESNEVIRKMDLDELGLWIEYLESSDT

SEQ ID NO: 43665 - protein, 85 aa, unidentified
  REGION 1..85: note = Description of Unknown:cds_NZ_WFIY01000004.1_cds_WP_155863773.1_1650 target sequence
NKLSEDEIRDKLKNLNNWEYKDNKLVKEFKFNTFDDSVNFLKLIQPVADSLDHHPDVHIYYNRVIIELTTHDAGGITDLDFKLAE

SEQ ID NO: 43666 - protein, 84 aa, unidentified
  REGION 1..84: note = Description of Unknown:cds_NZ_WFIY01000004.1_cds_WP_155863773.1_1650 target sequence
LKNLNNWEYKDNKLVKEFKFNTFDDSVNFLKLIQPVADSLDHHPDVHIYYNRVIIELTTHDAGGITDLDFKLAEKIDDLSRHIR

SEQ ID NO: 43667 - protein, 85 aa, unidentified
  REGION 1..85: note = Description of Unknown:cds_NZ_WFIY01000004.1_cds_WP_155864117.1_2068 target sequence
KNLKVEKYYKIPMKLDLSECKRINEVPFSLVENYVKFFNFFLPRNISEVIVIIPKNKMSESEVIGHAIRKIRNIDNIKIILLSDK

SEQ ID NO: 43668 - protein, 84 aa, unidentified
  REGION 1..84: note = Description of Unknown:cds_NZ_WFIY01000004.1_cds_WP_155864117.1_2068 target sequence
PMKLDLSECKRINEVPFSLVENYVKFFNFFLPRNISEVIVIIPKNKMSESEVIGHAIRKIRNIDNIKIILLSDKITNKFILCLK

SEQ ID NO: 43669 - protein, 85 aa, unidentified
  REGION 1..85: note = Description of Unknown:cds_NZ_WFIY01000004.1_cds_2216 target sequence
EEVRVVYEFLWVLAKLTPNVSLIETKIKELREFEIICESPETILNGIKMLKEDGKPLKMLNDYIILALAKELKGNLATYDEKLRK

SEQ ID NO: 43670 - protein, 84 aa, unidentified
  REGION 1..84: note = Description of Unknown:cds_NZ_WFIY01000004.1_cds_2216 target sequence
LAKLTPNVSLIETKIKELREFEIICESPETILNGIKMLKEDGKPLKMLNDYIILALAKELKGNLATYDEKLRKTAEKHGVKTIP

SEQ ID NO: 43671 - protein, 85 aa, unidentified
  REGION 1..85: note = Description of Unknown:cds_NC_035460.1_cds_YP_009407993.1_42 target sequence
KPKHWGRAVWTVIFIVITKASKDGDIEQCKKKLYTIIDNLPCPACQVHAKKAISDNNVMSSSDLNFIYYFFITLFNNLATDPVYK

SEQ ID NO: 43672 - protein, 84 aa, unidentified
  REGION 1..84: note = Description of Unknown:cds_NC_035460.1_cds_YP_009407993.1_42 target sequence
VIFIVITKASKDGDIEQCKKKLYTIIDNLPCPACQVHAKKAISDNNVMSSSDLNFIYYFFITLFNNLATDPVYKINITKVKPLV

SEQ ID NO: 43673 - protein, 85 aa, unidentified
  REGION 1..85: note = Description of Unknown:cds_NC_003214.2_cds_NP_445694.1_29 target sequence
QLKATSFRANEKIIFVLNSNKLFCETYDEFLNRLIDECEGAINYANNDITETLSIYSFKLSSETIGKLSTIAKKYRISRSEAFRK

SEQ ID NO: 43674 - protein, 84 aa, unidentified
  REGION 1..84: note = Description of Unknown:cds_NC_003214.2_cds_NP_445694.1_29 target sequence
KIIFVLNSNKLFCETYDEFLNRLIDECEGAINYANNDITETLSIYSFKLSSETIGKLSTIAKKYRISRSEAFRKLIIAKAEGLC

SEQ ID NO: 43675 - protein, 85 aa, unidentified
  REGION 1..85: note = Description of Unknown:cds_NC_030656.1_cds_YP_009268758.1_43 target sequence
EPRFWGRSMWTVIFIILSQAKVHKDVELCKKHLYVICTTLPCVVCRKHATKAIEKNNVMSSSDLNFIYYFFIRLFNNLATDERYK

SEQ ID NO: 43676 - protein, 84 aa, unidentified
  REGION 1..84: note = Description of Unknown:cds_NC_030656.1_cds_YP_009268758.1_43 target sequence
VIFIILSQAKVHKDVELCKKHLYVICTTLPCVVCRKHATKAIEKNNVMSSSDLNFIYYFFIRLFNNLATDERYKIDVTKVQPLV

SEQ ID NO: 43677 - protein, 85 aa, unidentified
  REGION 1..85: note = Description of Unknown:vpeps_2X5T_1 target sequence
GASLKEIIDELGKQAKEQNKIASRILKIKGIKRIVVQLNAVPQDGKIRYSLTIHSQNNFRKQIGITPQDAEDLKLIAEFLEKYSD

SEQ ID NO: 43678 - protein, 85 aa, unidentified
  REGION 1..85: note = Description of Unknown:vpeps_2X5T_1 target sequence
GKQAKEQNKIASRILKIKGIKRIVVQLNAVPQDGKIRYSLTIHSQNNFRKQIGITPQDAEDLKLIAEFLEKYSDFLNEYVKFTPR

SEQ ID NO: 43679 - protein, 85 aa, unidentified
  REGION 1..85: note = Description of Unknown:vpeps_2X5G_1 target sequence
GASLKEIIDELGKQAKEQNKIASRILKIKGIKRIVVQLNAVPQDGKIRYSMTIHSQNNFRKQIGITPQDAEDLKLIAEFLEKYSD

SEQ ID NO: 43680 - protein, 85 aa, unidentified
  REGION 1..85: note = Description of Unknown:vpeps_2X5G_1 target sequence
GKQAKEQNKIASRILKIKGIKRIVVQLNAVPQDGKIRYSMTIHSQNNFRKQIGITPQDAEDLKLIAEFLEKYSDFLNEYVKFTPR

SEQ ID NO: 43681 - protein, 85 aa, unidentified
  REGION 1..85: note = Description of Unknown:cds_NZ_WFIY01000004.1_cds_WP_155862506.1_265 target sequence
SELEIVNKLNVAYIESWKKRLTIYEIARIVSARALQLAMGAVPLIDISGFKPEQLNSISIAEEELKRGALPITIRRRFPNGKVEL

SEQ ID NO: 43682 - protein, 84 aa, unidentified
  REGION 1..84: note = Description of Unknown:cds_NZ_WFIY01000004.1_cds_WP_155862506.1_265 target sequence
VAYIESWKKRLTIYEIARIVSARALQLAMGAVPLIDISGFKPEQLNSISIAEEELKRGALPITIRRRFPNGKVELISVKEILGG

SEQ ID NO: 43683 - protein, 85 aa, unidentified
  REGION 1..85: note = Description of Unknown:cds_NZ_WFIY01000004.1_cds_WP_155862578.1_351 target sequence
KVPKTINTYCPKCKTHTPHSVSLYKGGKRRTLAEGQRRYDRKNLGYGGQRKPEQKRFAKVTKKAVLMLKCTKCGYVIMKPGIRIK

SEQ ID NO: 43684 - protein, 84 aa, unidentified
  REGION 1..84: note = Description of Unknown:cds_NZ_WFIY01000004.1_cds_WP_155862578.1_351 target sequence
PKCKTHTPHSVSLYKGGKRRTLAEGQRRYDRKNLGYGGQRKPEQKRFAKVTKKAVLMLKCTKCGYVIMKPGIRIKKVEIVEVAK

SEQ ID NO: 43685 - protein, 85 aa, unidentified
  REGION 1..85: note = Description of Unknown:cds_NZ_WFIY01000004.1_cds_WP_013775735.1_667 target sequence
ISTTDVLSLVIAFVLGLLVGILIKKIFQIGIIILAIIIILIAIGVISPSTVEHGLITLGQQASKAESEVSSYIRLLPYNSIAFII

SEQ ID NO: 43686 - protein, 84 aa, unidentified
  REGION 1..84: note = Description of Unknown:cds_NZ_WFIY01000004.1_cds_WP_013775735.1_667 target sequence
IAFVLGLLVGILIKKIFQIGIIILAIIIILIAIGVISPSTVEHGLITLGQQASKAESEVSSYIRLLPYNSIAFIIGLVIGLIKG

SEQ ID NO: 43687 - protein, 85 aa, unidentified
  REGION 1..85: note = Description of Unknown:cds_NZ_WFIY01000004.1_cds_WP_155864394.1_943 target sequence
CEDRKCVEEVVDDYLKSLLRPQSANEKFKLFQDNEEEDEEIDEKTVTNSYLFTEILIKRILNADLDLDFIFEDLKSKLGNSHPIV

SEQ ID NO: 43688 - protein, 84 aa, unidentified
  REGION 1..84: note = Description of Unknown:cds_NZ_WFIY01000004.1_cds_WP_155864394.1_943 target sequence
VDDYLKSLLRPQSANEKFKLFQDNEEEDEEIDEKTVTNSYLFTEILIKRILNADLDLDFIFEDLKSKLGNSHPIVIFLKELLEE

SEQ ID NO: 43689 - protein, 85 aa, unidentified
  REGION 1..85: note = Description of Unknown:cds_NZ_WFIY01000004.1_cds_WP_155863244.1_1192 target sequence
DKKFEDLPCSAKLVLKVIEMKGRTTFKELKEETLLPDRTLREAIRILKERGAIRSKICLDDTRTRYYEISCLELTELVEKEDERE

SEQ ID NO: 43690 - protein, 84 aa, unidentified
  REGION 1..84: note = Description of Unknown:cds_NZ_WFIY01000004.1_cds_WP_155863244.1_1192 target sequence
AKLVLKVIEMKGRTTFKELKEETLLPDRTLREAIRILKERGAIRSKICLDDTRTRYYEISCLELTELVEKEDEREIMGEERRKI

SEQ ID NO: 43691 - protein, 85 aa, unidentified
  REGION 1..85: note = Description of Unknown:cds_NZ_WFIY01000004.1_cds_WP_155863409.1_1389 target sequence
FGGLMKLGGYQVLEALKSGPLKISQLRNSVPLYGSAFDLVLSQLMLAGLVRRFEKDGEEYVELTDLGKSFPYYWGHGLYPEWFYG

SEQ ID NO: 43692 - protein, 84 aa, unidentified
  REGION 1..84: note = Description of Unknown:cds_NZ_WFIY01000004.1_cds_WP_155863409.1_1389 target sequence
QVLEALKSGPLKISQLRNSVPLYGSAFDLVLSQLMLAGLVRRFEKDGEEYVELTDLGKSFPYYWGHGLYPEWFYGHHHRHHHWW

SEQ ID NO: 43693 - protein, 85 aa, unidentified
  REGION 1..85: note = Description of Unknown:cds_NZ_WFIY01000004.1_cds_WP_205737144.1_1450 target sequence
VAQSIGRVRTFIHLVPYCWLLILELWRSIINVLGYPSPFRPPNPHLCKRRLSPRKVVERVDLIIAIMPSTRLREIASIINDNKLR

SEQ ID NO: 43694 - protein, 84 aa, unidentified
  REGION 1..84: note = Description of Unknown:cds_NZ_WFIY01000004.1_cds_WP_205737144.1_1450 target sequence
IHLVPYCWLLILELWRSIINVLGYPSPFRPPNPHLCKRRLSPRKVVERVDLIIAIMPSTRLREIASIINDNKLRLIVEIALDLH

SEQ ID NO: 43695 - protein, 85 aa, unidentified
  REGION 1..85: note = Description of Unknown:cds_NZ_WFIY01000004.1_cds_WP_155864481.1_2116 target sequence
EILSDPALNNSIRLGILLALFGLESINFSQLLKILNIPKSSLYTHLQVLEEGGYIRMTKKFTALGPRTFIEITEKGKEVMRQYLM

SEQ ID NO: 43696 - protein, 84 aa, unidentified
  REGION 1..84: note = Description of Unknown:cds_NZ_WFIY01000004.1_cds_WP_155864481.1_2116 target sequence
SIRLGILLALFGLESINFSQLLKILNIPKSSLYTHLQVLEEGGYIRMTKKFTALGPRTFIEITEKGKEVMRQYLMLVNKMSDKK

SEQ ID NO: 43697 - protein, 85 aa, unidentified
  REGION 1..85: note = Description of Unknown:cds_NC_003214.2_cds_NP_445685.1_20 target sequence
VEVVKKQIECKIKINSVNGIVSLDCETKVIFNVKDSEMPYAVSSIKEIGFVETIKTDQVKNMINRIVEELDKRIDEIKEGLNELE

SEQ ID NO: 43698 - protein, 84 aa, unidentified
  REGION 1..84: note = Description of Unknown:cds_NC_003214.2_cds_NP_445685.1_20 target sequence
KIKINSVNGIVSLDCETKVIFNVKDSEMPYAVSSIKEIGFVETIKTDQVKNMINRIVEELDKRIDEIKEGLNELEKSGLTIEVD

SEQ ID NO: 43699 - protein, 85 aa, unidentified
  REGION 1..85: note = Description of Unknown:cds_NC_030656.1_cds_YP_009268818.1_103 target sequence
SCYIAVIKSIGGLALFQVANGAIELIRHVFMYFCEHKLRSNSFSYVVIRIVINMLMYLILGIVLLYAFQDDKTDKSNDTDNKKCV

SEQ ID NO: 43700 - protein, 84 aa, unidentified
  REGION 1..84: note = Description of Unknown:cds_NC_030656.1_cds_YP_009268818.1_103 target sequence
GGLALFQVANGAIELIRHVFMYFCEHKLRSNSFSYVVIRIVINMLMYLILGIVLLYAFQDDKTDKSNDTDNKKCVSDKTSAGKN

SEQ ID NO: 43701 - protein, 85 aa, unidentified
  REGION 1..85: note = Description of Unknown:cds_NC_030656.1_cds_YP_009268825.1_110 target sequence
LLDKNFVILRRKNSLYPLNIFTTDGRMITEYDKNNYFYDDNFLIEENGPVVLINPTASQLLKTCVYLKSKVWIGKVYLLFDKQLL

SEQ ID NO: 43702 - protein, 84 aa, unidentified
  REGION 1..84: note = Description of Unknown:cds_NC_030656.1_cds_YP_009268825.1_110 target sequence
RKNSLYPLNIFTTDGRMITEYDKNNYFYDDNFLIEENGPVVLINPTASQLLKTCVYLKSKVWIGKVYLLFDKQLLHPFYNVNDI

SEQ ID NO: 43703 - protein, 85 aa, unidentified
  REGION 1..85: note = Description of Unknown:cds_NC_005830.1_cds_YP_003732.1_7 target sequence
GNETGKETSGKEQDKVKDVIIRLVEEDGRIAVYLVQGLNTEFLGYADEIQLAKEIAKLNKFISIWRLNPLDHRLRDYLRQEIIER

SEQ ID NO: 43704 - protein, 84 aa, unidentified
  REGION 1..84: note = Description of Unknown:cds_NC_005830.1_cds_YP_003732.1_7 target sequence
KEQDKVKDVIIRLVEEDGRIAVYLVQGLNTEFLGYADEIQLAKEIAKLNKFISIWRLNPLDHRLRDYLRQEIIERLVRVMAYMM

SEQ ID NO: 43705 - protein, 85 aa, unidentified
  REGION 1..85: note = Description of Unknown:cds_NC_038667.1_cds_YP_009507785.1_7 target sequence
SGDCAGLVSVFGSVHCQSSKNKAGGDLQATSILTTYWPHLAIGGGIILVIFLLGLFYCCYLKWKTSHIRRTYHKELVALTRGYVR

SEQ ID NO: 43706 - protein, 84 aa, unidentified
  REGION 1..84: note = Description of Unknown:cds_NC_038667.1_cds_YP_009507785.1_7 target sequence
FGSVHCQSSKNKAGGDLQATSILTTYWPHLAIGGGIILVIFLLGLFYCCYLKWKTSHIRRTYHKELVALTRGYVRPISADVTSV

SEQ ID NO: 43707 - protein, 85 aa, unidentified
  REGION 1..85: note = Description of Unknown:cds_NZ_WFIY01000004.1_cds_WP_155862321.1_46 target sequence
EGNKIVPLLKRLGLNTYNVDKKPHIEVNTDICINCKDKPCTVSCPAGTYEALPDGRIAVHYERCLECGGALVICPFGAIKFRFPE

SEQ ID NO: 43708 - protein, 84 aa, unidentified
  REGION 1..84: note = Description of Unknown:cds_NZ_WFIY01000004.1_cds_WP_155862321.1_46 target sequence
KRLGLNTYNVDKKPHIEVNTDICINCKDKPCTVSCPAGTYEALPDGRIAVHYERCLECGGALVICPFGAIKFRFPEGGISYRYG

SEQ ID NO: 43709 - protein, 85 aa, unidentified
  REGION 1..85: note = Description of Unknown:cds_NZ_WFIY01000004.1_cds_WP_155862379.1_115 target sequence
KSKRDQLEIIMDVMEVINDGYGSKSSIMKYANLSNTLLEKYINILTSKGLIKYEDGHYKMTEKGIALLEKLRKIRKLHLELSELI

SEQ ID NO: 43710 - protein, 84 aa, unidentified
  REGION 1..84: note = Description of Unknown:cds_NZ_WFIY01000004.1_cds_WP_155862379.1_115 target sequence
IMDVMEVINDGYGSKSSIMKYANLSNTLLEKYINILTSKGLIKYEDGHYKMTEKGIALLEKLRKIRKLHLELSELINSVSEELY

SEQ ID NO: 43711 - protein, 85 aa, unidentified
  REGION 1..85: note = Description of Unknown:cds_NZ_WFIY01000004.1_cds_WP_155862626.1_406 target sequence
ILGEFGVSLSITLIGIGIYGLINSRNVIRILLSSEIILNSTILLVFSISSLFGKVYSPIIFSIFAISMALIEVVVAFASIILYYR

SEQ ID NO: 43712 - protein, 84 aa, unidentified
  REGION 1..84: note = Description of Unknown:cds_NZ_WFIY01000004.1_cds_WP_155862626.1_406 target sequence
SITLIGIGIYGLINSRNVIRILLSSEIILNSTILLVFSISSLFGKVYSPIIFSIFAISMALIEVVVAFASIILYYRNKGSLEVD

SEQ ID NO: 43713 - protein, 85 aa, unidentified
  REGION 1..85: note = Description of Unknown:cds_NZ_WFIY01000004.1_cds_WP_155862882.1_723 target sequence
STRWLPKWKVVKINVKGKEVEVCYDDDLKLYACPFCNPVCKKGGIPDYSTYFYHVEDLVAHIIAHKNALWLKKRPQEIREEEEEG

SEQ ID NO: 43714 - protein, 84 aa, unidentified
  REGION 1..84: note = Description of Unknown:cds_NZ_WFIY01000004.1_cds_WP_155862882.1_723 target sequence
VVKINVKGKEVEVCYDDDLKLYACPFCNPVCKKGGIPDYSTYFYHVEDLVAHIIAHKNALWLKKRPQEIREEEEEGEEEDNEED

SEQ ID NO: 43715 - protein, 85 aa, unidentified
  REGION 1..85: note = Description of Unknown:cds_NZ_WFIY01000004.1_cds_WP_155863198.1_1135 target sequence
LKEILNNSSISELLQQGKEIDCTREEFFSELDEIIAKASAEGYKVEGPTLSYDKGLNKLTYDVKKDNKKVGEISLYYGNFYRKYI

SEQ ID NO: 43716 - protein, 84 aa, unidentified
  REGION 1..84: note = Description of Unknown:cds_NZ_WFIY01000004.1_cds_WP_155863198.1_1135 target sequence
ISELLQQGKEIDCTREEFFSELDEIIAKASAEGYKVEGPTLSYDKGLNKLTYDVKKDNKKVGEISLYYGNFYRKYIQYVKFSKS

SEQ ID NO: 43717 - protein, 85 aa, unidentified
  REGION 1..85: note = Description of Unknown:cds_NZ_WFIY01000004.1_cds_WP_162309152.1_1136 target sequence
RNFRQHLFAILVTYVSLTRIKDVINMVLWKYKDKVSEFTLVISDRFLVNAEIPFDKIERVDNYYIYLTDGETVIPIHRVLEIRRN

SEQ ID NO: 43718 - protein, 84 aa, unidentified
  REGION 1..84: note = Description of Unknown:cds_NZ_WFIY01000004.1_cds_WP_162309152.1_1136 target sequence
ILVTYVSLTRIKDVINMVLWKYKDKVSEFTLVISDRFLVNAEIPFDKIERVDNYYIYLTDGETVIPIHRVLEIRRNGKTIWSRK

SEQ ID NO: 43719 - protein, 85 aa, unidentified
  REGION 1..85: note = Description of Unknown:cds_NZ_WFIY01000004.1_cds_WP_155863565.1_1490 target sequence
KIGIYELKAKKGVIRTTVKYYGDSLDIKISGDFMVFPEDVIFDLEKKLQGLSLNDLQNLPKILEEILSKATLFGCTIEDFKNSIY

SEQ ID NO: 43720 - protein, 84 aa, unidentified
  REGION 1..84: note = Description of Unknown:cds_NZ_WFIY01000004.1_cds_WP_155863565.1_1490 target sequence
KKGVIRTTVKYYGDSLDIKISGDFMVFPEDVIFDLEKKLQGLSLNDLQNLPKILEEILSKATLFGCTIEDFKNSIYGALREVGL

SEQ ID NO: 43721 - protein, 85 aa, unidentified
  REGION 1..85: note = Description of Unknown:cds_NC_003214.2_cds_NP_445684.1_19 target sequence
NEQINEQIEFGEKYVKINDKFFYMSTENVEFIQWWYERFGHIKGIQFMEKLVKLFIIAKPEDYNDQWYVLDILKKHEKEISPLIN

SEQ ID NO: 43722 - protein, 84 aa, unidentified
  REGION 1..84: note = Description of Unknown:cds_NC_003214.2_cds_NP_445684.1_19 target sequence
FGEKYVKINDKFFYMSTENVEFIQWWYERFGHIKGIQFMEKLVKLFIIAKPEDYNDQWYVLDILKKHEKEISPLINLIYSNYEK

SEQ ID NO: 43723 - protein, 85 aa, unidentified
  REGION 1..85: note = Description of Unknown:cds_NC_035464.1_cds_YP_009408160.1_14 target sequence
VYQIYDGQYTVYPVGNPQVTLIRVDVAGRVKIMILPTVSEALQLTLNGNSGYLNQGNVLSAGNWYEFEYVSCGKDIISINGTQQG

SEQ ID NO: 43724 - protein, 84 aa, unidentified
  REGION 1..84: note = Description of Unknown:cds_NC_035464.1_cds_YP_009408160.1_14 target sequence
TVYPVGNPQVTLIRVDVAGRVKIMILPTVSEALQLTLNGNSGYLNQGNVLSAGNWYEFEYVSCGKDIISINGTQQGVYLRVIVY

SEQ ID NO: 43725 - protein, 85 aa, unidentified
  REGION 1..85: note = Description of Unknown:cds_NC_005830.1_cds_YP_003744.1_19 target sequence
LLVEISNIYFMIATVVTVITSMYKIYRMMVRFIDNKIDSYLKPITEIQREEVEILRLIFATAPIKERKLYEQLDYDLKEIEKRLN

SEQ ID NO: 43726 - protein, 84 aa, unidentified
  REGION 1..84: note = Description of Unknown:cds_NC_005830.1_cds_YP_003744.1_19 target sequence
MIATVVTVITSMYKIYRMMVRFIDNKIDSYLKPITEIQREEVEILRLIFATAPIKERKLYEQLDYDLKEIEKRLNDLNDSVNRH

SEQ ID NO: 43727 - protein, 85 aa, unidentified
  REGION 1..85: note = Description of Unknown:cds_NC_010495.1_cds_YP_001742060.1_23 target sequence
NETLRQAAEQVISGATGQVIDKAGYASIGTGIGLKVAEQTPVAQSYFETIIPHSLTEWAAVASIIGAISLAIKNLFEIWWRVRRH

SEQ ID NO: 43728 - protein, 84 aa, unidentified
  REGION 1..84: note = Description of Unknown:cds_NC_010495.1_cds_YP_001742060.1_23 target sequence
QVISGATGQVIDKAGYASIGTGIGLKVAEQTPVAQSYFETIIPHSLTEWAAVASIIGAISLAIKNLFEIWWRVRRHKKNDSTNT

SEQ ID NO: 43729 - protein, 85 aa, unidentified
  REGION 1..85: note = Description of Unknown:cds_NC_043030.1_cds_YP_009664536.1_1 target sequence
VWAVIRKSLEVELPEGLFSDYVVISRAIKHLEAASNLLMAAGFETPVKPIGQALEDLKARRENMKRALKEAILEAALEEFLEAVV

SEQ ID NO: 43730 - protein, 84 aa, unidentified
  REGION 1..84: note = Description of Unknown:cds_NC_043030.1_cds_YP_009664536.1_1 target sequence
VELPEGLFSDYVVISRAIKHLEAASNLLMAAGFETPVKPIGQALEDLKARRENMKRALKEAILEAALEEFLEAVVAQAEGGDSR

SEQ ID NO: 43731 - protein, 85 aa, unidentified
  REGION 1..85: note = Description of Unknown:hvTR_P06465 target sequence
VGEMPALKDLVLQLEPSVLDLDLYCYEEVPPDDIEEELVSPQQPYAVVASCAYCEKLVRLTVLADHSAIRQLEELLLRSLNIVCP

SEQ ID NO: 43732 - protein, 84 aa, unidentified
  REGION 1..84: note = Description of Unknown:hvTR_P06465 target sequence
DLVLQLEPSVLDLDLYCYEEVPPDDIEEELVSPQQPYAVVASCAYCEKLVRLTVLADHSAIRQLEELLLRSLNIVCPLCTLQRQ

SEQ ID NO: 43733 - protein, 85 aa, unidentified
  REGION 1..85: note = Description of Unknown:cds_NZ_WFIY01000004.1_cds_WP_155862285.1_1 target sequence
YVVVAFDISSEKVRGKIRRYLRRLGLSMVNRSVYAGIGGYKTAFLISDMAKKHLEEGDNLYIVVIRDSEYESSVNCTKGDCRKLS

SEQ ID NO: 43734 - protein, 84 aa, unidentified
  REGION 1..84: note = Description of Unknown:cds_NZ_WFIY01000004.1_cds_WP_155862285.1_1 target sequence
SSEKVRGKIRRYLRRLGLSMVNRSVYAGIGGYKTAFLISDMAKKHLEEGDNLYIVVIRDSEYESSVNCTKGDCRKLSERKYEVL

SEQ ID NO: 43735 - protein, 85 aa, unidentified
  REGION 1..85: note = Description of Unknown:cds_NZ_WFIY01000004.1_cds_WP_155862522.1_286 target sequence
LKIRRRFSPYGQGLGNVILRLISKNKTTAYGLFLDNHLVSAAYTWIELENIAVIGGTKEEFRNMGLATSVESMLTEDLTKRGKPL

SEQ ID NO: 43736 - protein, 84 aa, unidentified
  REGION 1..84: note = Description of Unknown:cds_NZ_WFIY01000004.1_cds_WP_155862522.1_286 target sequence
YGQGLGNVILRLISKNKTTAYGLFLDNHLVSAAYTWIELENIAVIGGTKEEFRNMGLATSVESMLTEDLTKRGKPLCMREKITV

SEQ ID NO: 43737 - protein, 85 aa, unidentified
  REGION 1..85: note = Description of Unknown:cds_NZ_WFIY01000004.1_cds_389 target sequence
EIKEISRSKIDYRIVEIAQSSPSTEVEATVILNVPPSEDVLKSLENVKVERVFNFMQTIKIRGKAKDVLSIASKDFVTYIMLDEI

SEQ ID NO: 43738 - protein, 84 aa, unidentified
  REGION 1..84: note = Description of Unknown:cds_NZ_WFIY01000004.1_cds_389 target sequence
IDYRIVEIAQSSPSTEVEATVILNVPPSEDVLKSLENVKVERVFNFMQTIKIRGKAKDVLSIASKDFVTYIMLDEIIVKNEEWI

SEQ ID NO: 43739 - protein, 85 aa, unidentified
  REGION 1..85: note = Description of Unknown:cds_NZ_WFIY01000004.1_cds_442 target sequence
VSIRRIVLDVLKPIKGTTIIDLAGKLTELEGIDGVNISVTDMDVETMGLMVVIEGSNINFEEVKKVLEEDGCAIHSIDEVAAGNR

SEQ ID NO: 43740 - protein, 84 aa, unidentified
  REGION 1..84: note = Description of Unknown:cds_NZ_WFIY01000004.1_cds_442 target sequence
VLKPIKGTTIIDLAGKLTELEGIDGVNISVTDMDVETMGLMVVIEGSNINFEEVKKVLEEDGCAIHSIDEVAAGNRLVEGRKGK

SEQ ID NO: 43741 - protein, 85 aa, unidentified
  REGION 1..85: note = Description of Unknown:cds_NZ_WFIY01000004.1_cds_WP_155862661.1_453 target sequence
SEVLDKLYEIILQRLEKMPENSYTAELAKKGKGYIARKVGEEAVETIVASLYEGRDRFISEAADLMYHLWVLMAVEGVKPEELYS

SEQ ID NO: 43742 - protein, 84 aa, unidentified
  REGION 1..84: note = Description of Unknown:cds_NZ_WFIY01000004.1_cds_WP_155862661.1_453 target sequence
EIILQRLEKMPENSYTAELAKKGKGYIARKVGEEAVETIVASLYEGRDRFISEAADLMYHLWVLMAVEGVKPEELYSELRRRMK

SEQ ID NO: 43743 - protein, 85 aa, unidentified
  REGION 1..85: note = Description of Unknown:cds_NZ_WFIY01000004.1_cds_WP_205737156.1_519 target sequence
TNDLPRNFNAPVDIEVDRDKGSVLLRNIIKDDPQNPLYIEYYIDREFVENISRSGKIDIFFVNEKFDELGKFEVKLMKEDLAIIR

SEQ ID NO: 43744 - protein, 84 aa, unidentified
  REGION 1..84: note = Description of Unknown:cds_NZ_WFIY01000004.1_cds_WP_205737156.1_519 target sequence
NAPVDIEVDRDKGSVLLRNIIKDDPQNPLYIEYYIDREFVENISRSGKIDIFFVNEKFDELGKFEVKLMKEDLAIIRREIGLGN

SEQ ID NO: 43745 - protein, 85 aa, unidentified
  REGION 1..85: note = Description of Unknown:cds_NZ_WFIY01000004.1_cds_WP_152941916.1_1751 target sequence
VKVIKRDGSEEELIYEKIVVSVLKTGAPIDIARKIAFMTIGKIYMDNKESVTAKELTSLILNYLKAENETWYRNWIAYDRVAKKR

SEQ ID NO: 43746 - protein, 84 aa, unidentified
  REGION 1..84: note = Description of Unknown:cds_NZ_WFIY01000004.1_cds_WP_152941916.1_1751 target sequence
SEEELIYEKIVVSVLKTGAPIDIARKIAFMTIGKIYMDNKESVTAKELTSLILNYLKAENETWYRNWIAYDRVAKKRETEKELK

SEQ ID NO: 43747 - protein, 85 aa, unidentified
  REGION 1..85: note = Description of Unknown:cds_NZ_WFIY01000004.1_cds_WP_152942085.1_1850 target sequence
NFDEIKDKKPQKVGEFIDKAEDGDNYIIKVSDDKIFEVAPIAYYIWAMCDGSKTVTQIVDEISKEANIEFDQLKDPVTAVLEQLQ

SEQ ID NO: 43748 - protein, 84 aa, unidentified
  REGION 1..84: note = Description of Unknown:cds_NZ_WFIY01000004.1_cds_WP_152942085.1_1850 target sequence
KPQKVGEFIDKAEDGDNYIIKVSDDKIFEVAPIAYYIWAMCDGSKTVTQIVDEISKEANIEFDQLKDPVTAVLEQLQQASLITL

SEQ ID NO: 43749 - protein, 85 aa, unidentified
  REGION 1..85: note = Description of Unknown:cds_NZ_WFIY01000004.1_cds_WP_155864478.1_2054 target sequence
IYEKDGKEYSFLAVCPHKNRPILFEGYKIDNDKIECPFHHAVFSLITGELIKPPNSKTPCPADCKLIKVEFISSGVKFYGKPIIP

SEQ ID NO: 43750 - protein, 84 aa, unidentified
  REGION 1..84: note = Description of Unknown:cds_NZ_WFIY01000004.1_cds_WP_155864478.1_2054 target sequence
YSFLAVCPHKNRPILFEGYKIDNDKIECPFHHAVFSLITGELIKPPNSKTPCPADCKLIKVEFISSGVKFYGKPIIPELPRKDT

SEQ ID NO: 43751 - protein, 85 aa, unidentified
  REGION 1..85: note = Description of Unknown:cds_NZ_WFIY01000004.1_cds_WP_148230371.1_2230 target sequence
LDEVVEKFKGKYSLIITTSGLSFALKKGIDVDKALDEGVKVLAYSHKFQPLEGLSVEETEAVLLAKDLNYYLITADDKVKEFAEK

SEQ ID NO: 43752 - protein, 84 aa, unidentified
  REGION 1..84: note = Description of Unknown:cds_NZ_WFIY01000004.1_cds_WP_148230371.1_2230 target sequence
GKYSLIITTSGLSFALKKGIDVDKALDEGVKVLAYSHKFQPLEGLSVEETEAVLLAKDLNYYLITADDKVKEFAEKEGVKVIII

SEQ ID NO: 43753 - protein, 85 aa, unidentified
  REGION 1..85: note = Description of Unknown:cds_NZ_WFIY01000004.1_cds_WP_155864274.1_2267 target sequence
FALQPSDIAIIIIVALILFFGTSKIPELFRSMGKAVGEFKKGRLEAELEMQQMQQQTQPQVQSNTDKAAELEKQIQELQKQLEQL

SEQ ID NO: 43754 - protein, 84 aa, unidentified
  REGION 1..84: note = Description of Unknown:cds_NZ_WFIY01000004.1_cds_WP_155864274.1_2267 target sequence
AIIIIVALILFFGTSKIPELFRSMGKAVGEFKKGRLEAELEMQQMQQQTQPQVQSNTDKAAELEKQIQELQKQLEQLKNQKQQQ

SEQ ID NO: 43755 - protein, 85 aa, unidentified; identical to SEQ ID NO: 43733
  REGION 1..85: note = Description of Unknown:cds_NZ_WFIY01000003.1_cds_WP_155862285.1_2370 target sequence

SEQ ID NO: 43756 - protein, 84 aa, unidentified; identical to SEQ ID NO: 43734
  REGION 1..84: note = Description of Unknown:cds_NZ_WFIY01000003.1_cds_WP_155862285.1_2370 target sequence

SEQ ID NO: 43757 - protein, 85 aa, unidentified
  REGION 1..85: note = Description of Unknown:cds_NC_035460.1_cds_YP_009408061.1_110 target sequence
DVLGTVGHYFSGFIIAGIVLLALACIFAFIEFSKTKTTNYTWRALSIIAFIIGIIITVGMFVYSMYGRYCVPSKVVIDGCRYNSS

SEQ ID NO: 43758 - protein, 84 aa, unidentified
  REGION 1..84: note = Description of Unknown:cds_NC_035460.1_cds_YP_009408061.1_110 target sequence
YFSGFIIAGIVLLALACIFAFIEFSKTKTTNYTWRALSIIAFIIGIIITVGMFVYSMYGRYCVPSKVVIDGCRYNSSQIELNAQ

SEQ ID NO: 43759 - protein, 85 aa, unidentified
  REGION 1..85: note = Description of Unknown:cds_NC_003214.2_cds_NP_445690.1_25 target sequence
IYTIRISKKYFYKLVNMCKEYKSYRECVMKELEKKYQVKIYNSTRSHDMNIKNDLIPKVINIIFYDQENERLEELAQRLGKTKYE

SEQ ID NO: 43760 - protein, 84 aa, unidentified
  REGION 1..84: note = Description of Unknown:cds_NC_003214.2_cds_NP_445690.1_25 target sequence
KYFYKLVNMCKEYKSYRECVMKELEKKYQVKIYNSTRSHDMNIKNDLIPKVINIIFYDQENERLEELAQRLGKTKYEIIISLFK

SEQ ID NO: 43761 - protein, 85 aa, unidentified
  REGION 1..85: note = Description of Unknown:cds_NC_029316.1_cds_YP_009230311.1_58 target sequence
LLYIFILMRLFEHMKIGRYKVECDDELCYITNPDGKVTAIDKYNFSTFAKNLARTIALEKIPINEIENYDKRKLDEMTNRIYSQM

SEQ ID NO: 43762 - protein, 84 aa, unidentified
  REGION 1..84: note = Description of Unknown:cds_NC_029316.1_cds_YP_009230311.1_58 target sequence
LFEHMKIGRYKVECDDELCYITNPDGKVTAIDKYNFSTFAKNLARTIALEKIPINEIENYDKRKLDEMTNRIYSQMIKSVMYNT

SEQ ID NO: 43763 - protein, 85 aa, unidentified
  REGION 1..85: note = Description of Unknown:cds_NC_030656.1_cds_YP_009268823.1_108 target sequence
DLIQTIRTYYSGALFGGIALLVLTAIFAFLDFSKTTPSNYTWRALSITCFVVACIILVGLFLFVGYGRYCTGPVLINAGNMRNVS

SEQ ID NO: 43764 - protein, 84 aa, unidentified
  REGION 1..84: note = Description of Unknown:cds_NC_030656.1_cds_YP_009268823.1_108 target sequence
YYSGALFGGIALLVLTAIFAFLDFSKTTPSNYTWRALSITCFVVACIILVGLFLFVGYGRYCTGPVLINAGNMRNVSDIELNCN

SEQ ID NO: 43765 - protein, 85 aa, unidentified
  REGION 1..85: note = Description of Unknown:cds_NC_009884.1_cds_YP_001496965.1_40 target sequence
NPNARDTDKDGDVRPVFTAPKPLSMSILSVINELICSEMQLRFYYHSGDMIPMSDLYRLLTKCTTTPDLMVRKLIEMNVIGVTDN

SEQ ID NO: 43766 - protein, 84 aa, unidentified
  REGION 1..84: note = Description of Unknown:cds_NC_009884.1_cds_YP_001496965.1_40 target sequence
KDGDVRPVFTAPKPLSMSILSVINELICSEMQLRFYYHSGDMIPMSDLYRLLTKCTTTPDLMVRKLIEMNVIGVTDNANVVVLK

SEQ ID NO: 43767 - protein, 85 aa, unidentified
  REGION 1..85: note = Description of Unknown:cds_NC_043030.1_cds_YP_009664543.1_8 target sequence
RLVPISLRRIQASGQGEGSVLREFRTLLIGVALLFLAPTLISVITGLADITLAVDVDGDGTTEDLSALLKIMALIGPVLLVAGAL

SEQ ID NO: 43768 - protein, 84 aa, unidentified
  REGION 1..84: note = Description of Unknown:cds_NC_043030.1_cds_YP_009664543.1_8 target sequence
RIQASGQGEGSVLREFRTLLIGVALLFLAPTLISVITGLADITLAVDVDGDGTTEDLSALLKIMALIGPVLLVAGALDAVINRG

SEQ ID NO: 43769 - protein, 85 aa, unidentified
  REGION 1..85: note = Description of Unknown:hvTR_P04874 target sequence
MSHQQVQMDLILMQGIWTSVLKMQNHSTLLQLGSSSSMPQRPRLLSRVSQRGRLTLNLESGRWRLSIIIFLETGTTQLVTTILPS

SEQ ID NO: 43770 - protein, 84 aa, unidentified
  REGION 1..84: note = Description of Unknown:hvTR_P04874 target sequence
MDLILMQGIWTSVLKMQNHSTLLQLGSSSSMPQRPRLLSRVSQRGRLTLNLESGRWRLSIIIFLETGTTQLVTTILPSTDYLGI

SEQ ID NO: 43771 - protein, 85 aa, unidentified
  REGION 1..85: note = Description of Unknown:hvTR_B3U4X9 target sequence
MSTRLMPMSLTLIQDTWILKITIQGHSIQIPLGHSSSMPQRPRMCSAINLTRRSILNLETGRWRLSIIIFLETGTTQLVKMILPS

SEQ ID NO: 43772 - protein, 84 aa, unidentified
  REGION 1..84: note = Description of Unknown:hvTR_B3U4X9 target sequence
MSLTLIQDTWILKITIQGHSIQIPLGHSSSMPQRPRMCSAINLTRRSILNLETGRWRLSIIIFLETGTTQLVKMILPSTEFQDI

SEQ ID NO: 43773 - protein, 85 aa, unidentified
  REGION 1..85: note = Description of Unknown:cds_NC_024711.1_cds_YP_009442998.1_11 target sequence
IENVSHFILGMIFGLSVYLFIRISIVSKKLDRLIRDINDTQNWIRKIQIDICDINKQWEVKRNRDRNRLDRIEDRIGKLASDFND

SEQ ID NO: 43774 - protein, 84 aa, unidentified
  REGION 1..84: note = Description of Unknown:cds_NC_024711.1_cds_YP_009442998.1_11 target sequence
ILGMIFGLSVYLFIRISIVSKKLDRLIRDINDTQNWIRKIQIDICDINKQWEVKRNRDRNRLDRIEDRIGKLASDFNDIIRKKV

SEQ ID NO: 43775 - protein, 85 aa, unidentified
  REGION 1..85: note = Description of Unknown:cds_NC_024711.1_cds_YP_009052518.1_39 target sequence
IRIDCFTRDGCDACKIAIKNITDAINEANCDITLNIRNTNLDDILRKEITKFPTTVITKVDNDYKRKELARLEGSFPSDYIKDII

SEQ ID NO: 43776 - protein, 84 aa, unidentified
  REGION 1..84: note = Description of Unknown:cds_NC_024711.1_cds_YP_009052518.1_39 target sequence
RDGCDACKIAIKNITDAINEANCDITLNIRNTNLDDILRKEITKFPTTVITKVDNDYKRKELARLEGSFPSDYIKDIINKLEKE

SEQ ID NO: 43777 - protein, 85 aa, unidentified
  REGION 1..85: note = Description of Unknown:cds_NZ_WFIY01000004.1_cds_WP_155862771.1_585 target sequence
SVPLKTIEREDIRKLETALLLTALYSKETIDTIEEEKERITSIDSLYIAAAFAREKAGIPTSKIADEIGITEDTIRRHLRGETKA

SEQ ID NO: 43778 - protein, 84 aa, unidentified
  REGION 1..84: note = Description of Unknown:cds_NZ_WFIY01000004.1_cds_WP_155862771.1_585 target sequence
EREDIRKLETALLLTALYSKETIDTIEEEKERITSIDSLYIAAAFAREKAGIPTSKIADEIGITEDTIRRHLRGETKARQLINT

SEQ ID NO: 43779 - protein, 85 aa, unidentified
  REGION 1..85: note = Description of Unknown:cds_NZ_WFIY01000004.1_cds_WP_155863300.1_1258 target sequence
QIYLILPYLIILSILVFTFINGIVKIILNIANTLLVYGIIINMIWSLSYVPYLIYGIKISLEKPKDVNRNLIVQIPLIIPARILL

SEQ ID NO: 43780 - protein, 84 aa, unidentified
  REGION 1..84: note = Description of Unknown:cds_NZ_WFIY01000004.1_cds_WP_155863300.1_1258 target sequence
YLIILSILVFTFINGIVKIILNIANTLLVYGIIINMIWSLSYVPYLIYGIKISLEKPKDVNRNLIVQIPLIIPARILLVSKFYK

SEQ ID NO: 43781 - protein, 85 aa, unidentified
  REGION 1..85: note = Description of Unknown:cds_NZ_WFIY01000004.1_cds_WP_155863376.1_1349 target sequence
TKRFDIKIEDDRLIVYNLHTEPLYIKEITISYEVEVITPTGEKGIKKVKQTIPIEKKVVKVLDIPVVSREISEVRVSYVFNNEKA

SEQ ID NO: 43782 - protein, 84 aa, unidentified
  REGION 1..84: note = Description of Unknown:cds_NZ_WFIY01000004.1_cds_WP_155863376.1_1349 target sequence
IEDDRLIVYNLHTEPLYIKEITISYEVEVITPTGEKGIKKVKQTIPIEKKVVKVLDIPVVSREISEVRVSYVFNNEKAEEIHHL

SEQ ID NO: 43783 - protein, 85 aa, unidentified
  REGION 1..85: note = Description of Unknown:cds_NZ_WFIY01000004.1_cds_WP_155863705.1_1561 target sequence
KYHELISIKNDMFISKNAADIIMYMKPGEKIVFKKNQELSLIVHKGEGELSIGKRRVKLKEKSTIISKEATEKIIVAITSMLLFI

SEQ ID NO: 43784 - protein, 84 aa, unidentified
  REGION 1..84: note = Description of Unknown:cds_NZ_WFIY01000004.1_cds_WP_155863705.1_1561 target sequence
IKNDMFISKNAADIIMYMKPGEKIVFKKNQELSLIVHKGEGELSIGKRRVKLKEKSTIISKEATEKIIVAITSMLLFIHIEAIV

SEQ ID NO: 43785 - protein, 85 aa, unidentified
  REGION 1..85: note = Description of Unknown:cds_NZ_WFIY01000004.1_cds_WP_155863999.1_1925 target sequence
EWKITSKKLEVDNKKDYSCLVDDIANSEKIKELSKKYNIPENIIHEFISQFLIKVFKEKKNTEEEIIEKFSMPREIVDEVKRQAS

SEQ ID NO: 43786 - protein, 84 aa, unidentified
  REGION 1..84: note = Description of Unknown:cds_NZ_WFIY01000004.1_cds_WP_155863999.1_1925 target sequence
KLEVDNKKDYSCLVDDIANSEKIKELSKKYNIPENIIHEFISQFLIKVFKEKKNTEEEIIEKFSMPREIVDEVKRQASSSLSLQ

SEQ ID NO: 43787 - protein, 85 aa, unidentified
  REGION 1..85: note = Description of Unknown:cds_NC_009489.1_cds_YP_001249274.1_5 target sequence
TYSVQGWTPSSSLQIKSQSRMMLMALQRTAPRKLRMDPTPAQAIQHRCKVQNQRATEFTHLFLLHLLCPLQGTLARELTIQFSMT

SEQ ID NO: 43788 - protein, 84 aa, unidentified
  REGION 1..84: note = Description of Unknown:cds_NC_009489.1_cds_YP_001249274.1_5 target sequence
TPSSSLQIKSQSRMMLMALQRTAPRKLRMDPTPAQAIQHRCKVQNQRATEFTHLFLLHLLCPLQGTLARELTIQFSMTTLDVGK

SEQ ID NO: 43789 - protein, 85 aa, unidentified
  REGION 1..85: note = Description of Unknown:cds_NC_011505.2_cds_YP_002302225.1_12 target sequence
NRLQQRQLFLENLLVGVNSTFHQMQKHSINTCCRSLQRILDHLILLQTIHSPVFRLDRMQLRQMQTLACLWIHQHNHDLQVMSDA

SEQ ID NO: 43790 - protein, 84 aa, unidentified
  REGION 1..84: note = Description of Unknown:cds_NC_011505.2_cds_YP_002302225.1_12 target sequence
LFLENLLVGVNSTFHQMQKHSINTCCRSLQRILDHLILLQTIHSPVFRLDRMQLRQMQTLACLWIHQHNHDLQVMSDAIKWISP

SEQ ID NO: 43791 - protein, 85 aa, unidentified
  REGION 1..85: note = Description of Unknown:cds_NC_010495.1_cds_YP_001742043.1_6 target sequence
KLSQRGKEALGIADAVDISPYITTETTQNQFDALTSLAAEIGIDAFRKSTLLKKHNLRCFSCVVAHFIVWGEKTDNKAKRKAEKE

SEQ ID NO: 43792 - protein, 84 aa, unidentified
  REGION 1..84: note = Description of Unknown:cds_NC_010495.1_cds_YP_001742043.1_6 target sequence
EALGIADAVDISPYITTETTQNQFDALTSLAAEIGIDAFRKSTLLKKHNLRCFSCVVAHFIVWGEKTDNKAKRKAEKEVYWYGY

SEQ ID NO: 43793 - protein, 85 aa, unidentified
  REGION 1..85: note = Description of Unknown:cds_NZ_WFIY01000004.1_cds_WP_155862428.1_170 target sequence
SVLDQEEFIQLRKFKGKANKEELQKILEEIEEQVNKGVSLRSSIIFTYANYVEEVKKNKDFYNLISTILEKYSPKLGVENVTELI

SEQ ID NO: 43794 - protein, 84 aa, unidentified
  REGION 1..84: note = Description of Unknown:cds_NZ_WFIY01000004.1_cds_WP_155862428.1_170 target sequence
EFIQLRKFKGKANKEELQKILEEIEEQVNKGVSLRSSIIFTYANYVEEVKKNKDFYNLISTILEKYSPKLGVENVTELIINTLS

SEQ ID NO: 43795 - protein, 85 aa, unidentified
  REGION 1..85: note = Description of Unknown:cds_NZ_WFIY01000004.1_cds_WP_155862441.1_190 target sequence
RWLKKREIVIYFLLYRKFGYDVFNLGEALDVLKPFFSKKVSLSAIKYMQKIGLINKIDFLEYRLSNFDEYIYLMSIDYLKRRATL

SEQ ID NO: 43796 - protein, 84 aa, unidentified
  REGION 1..84: note = Description of Unknown:cds_NZ_WFIY01000004.1_cds_WP_155862441.1_190 target sequence
EIVIYFLLYRKFGYDVFNLGEALDVLKPFFSKKVSLSAIKYMQKIGLINKIDFLEYRLSNFDEYIYLMSIDYLKRRATLRHKIQ

SEQ ID NO: 43797 - protein, 85 aa, unidentified
  REGION 1..85: note = Description of Unknown:cds_NZ_WFIY01000004.1_cds_WP_155862485.1_241 target sequence
RAFEAKICGEKLILQNKSGETLFIREILIKYKVTVTTADEKTALKTITDSIKINRDVQDKIEIPLISTDVVEISVIYRQDDITLR

SEQ ID NO: 43798 - protein, 84 aa, unidentified
  REGION 1..84: note = Description of Unknown:cds_NZ_WFIY01000004.1_cds_WP_155862485.1_241 target sequence
ICGEKLILQNKSGETLFIREILIKYKVTVTTADEKTALKTITDSIKINRDVQDKIEIPLISTDVVEISVIYRQDDITLREDISL

SEQ ID NO: 43799 - protein, 85 aa, unidentified
  REGION 1..85: note = Description of Unknown:cds_NZ_WFIY01000004.1_cds_WP_152940800.1_369 target sequence
QIKILKSNDTYAEIEIEGEEHTLGNLLAGSLRKVEGVIYASYYQPHPLVNSIVLKVMTNGEIKPMDAIKKAIEIAENYANKYLEE

SEQ ID NO: 43800 - protein, 84 aa, unidentified
  REGION 1..84: note = Description of Unknown:cds_NZ_WFIY01000004.1_cds_WP_152940800.1_369 target sequence
SNDTYAEIEIEGEEHTLGNLLAGSLRKVEGVIYASYYQPHPLVNSIVLKVMTNGEIKPMDAIKKAIEIAENYANKYLEEIKKIE

SEQ ID NO: 43801 - protein, 85 aa, unidentified
  REGION 1..85: note = Description of Unknown:cds_NZ_WFIY01000004.1_cds_WP_013775694.1_710 target sequence
SLRDYEGNKIAIWLAYFTADSRRKGRKTKKVKITLDDLFSAAKALGLEPEVLDKVHPGSRVKGLIMVKKVKGKYKLIKDIYSYLQ

SEQ ID NO: 43802 - protein, 84 aa, unidentified
  REGION 1..84: note = Description of Unknown:cds_NZ_WFIY01000004.1_cds_WP_013775694.1_710 target sequence
GNKIAIWLAYFTADSRRKGRKTKKVKITLDDLFSAAKALGLEPEVLDKVHPGSRVKGLIMVKKVKGKYKLIKDIYSYLQQQKKL

SEQ ID NO: 43803 - protein, 85 aa, unidentified
  REGION 1..85: note = Description of Unknown:cds_NZ_WFIY01000004.1_cds_WP_013775432.1_981 target sequence
TDVLVVLKVFPDSDEVNLDKLAEEISKKLPQNYSIVRKETEPIAFGLQALVLYVKMPEETEGGTDTLEEIASNVEGVSHAEVVGI

SEQ ID NO: 43804 - protein, 84 aa, unidentified
  REGION 1..84: note = Description of Unknown:cds_NZ_WFIY01000004.1_cds_WP_013775432.1_981 target sequence
LKVFPDSDEVNLDKLAEEISKKLPQNYSIVRKETEPIAFGLQALVLYVKMPEETEGGTDTLEEIASNVEGVSHAEVVGITRLGF

SEQ ID NO: 43805 - protein, 85 aa, unidentified
  REGION 1..85: note = Description of Unknown:cds_NZ_WFIY01000004.1_cds_WP_155863453.1_1421 target sequence
CVAFPGKVIEINGDFGKIDFGNGTIRDNILLSLVNAKVGDYVLVHAGYAIQVVDEEEARRSIEIWNEMTRELPKEKRIQDFNEVV

SEQ ID NO: 43806 - protein, 84 aa, unidentified
  REGION 1..84: note = Description of Unknown:cds_NZ_WFIY01000004.1_cds_WP_155863453.1_1421 target sequence
KVIEINGDFGKIDFGNGTIRDNILLSLVNAKVGDYVLVHAGYAIQVVDEEEARRSIEIWNEMTRELPKEKRIQDFNEVVGRGNE

SEQ ID NO: 43807 - protein, 85 aa, unidentified
  REGION 1..85: note = Description of Unknown:cds_NZ_WFIY01000004.1_cds_WP_155863941.1_1859 target sequence
LIDKEKLGVNKLVHNTLSDCDLYVIEDKEGKTYLLFVFNNNYFKIMPAYPGKWDCEESLYRPFGLFGFVFEGEDINEKIKKKLEE

SEQ ID NO: 43808 - protein, 84 aa, unidentified
  REGION 1..84: note = Description of Unknown:cds_NZ_WFIY01000004.1_cds_WP_155863941.1_1859 target sequence
GVNKLVHNTLSDCDLYVIEDKEGKTYLLFVFNNNYFKIMPAYPGKWDCEESLYRPFGLFGFVFEGEDINEKIKKKLEELKSAGL

SEQ ID NO: 43809 - protein, 85 aa, unidentified
  REGION 1..85: note = Description of Unknown:cds_NZ_WFIY01000004.1_cds_WP_155864484.1_2176 target sequence
KDLKGALREVLEEYFGKPKSFADLDRTYDFMKDSLGYVRIENLRKQLGMSLEQFMAKFGDYILQHYELIPGGEEGFIKNGVMYGI

SEQ ID NO: 43810 - protein, 84 aa, unidentified
  REGION 1..84: note = Description of Unknown:cds_NZ_WFIY01000004.1_cds_WP_155864484.1_2176 target sequence
LREVLEEYFGKPKSFADLDRTYDFMKDSLGYVRIENLRKQLGMSLEQFMAKFGDYILQHYELIPGGEEGFIKNGVMYGIIRRKR

SEQ ID NO: 43811 - protein, 85 aa, unidentified
  REGION 1..85: note = Description of Unknown:cds_NC_030656.1_cds_YP_009268781.1_66 target sequence
MNQVLIAKLNNIERQLQRDELFINAIEHYIIGNMVMVSKLLKLLLDIVFTIYVIIGLLIRFTYRNQWVLVFLILVMLFTWISDYF

SEQ ID NO: 43812 - protein, 84 aa, unidentified
  REGION 1..84: note = Description of Unknown:cds_NC_030656.1_cds_YP_009268781.1_66 target sequence
AKLNNIERQLQRDELFINAIEHYIIGNMVMVSKLLKLLLDIVFTIYVIIGLLIRFTYRNQWVLVFLILVMLFTWISDYFQKYFL

SEQ ID NO: 43813 - protein, 85 aa, unidentified
  REGION 1..85: note = Description of Unknown:hvTR_O42047 target sequence
TKPKIMILPDKYPCSISSILISSESMIATFNHKNILQFNHNHLDNHQRLLNNIFDEIHWTPKNLLDATQQFLQHLNIPEDIYTIY

SEQ ID NO: 43814 - protein, 84 aa, unidentified
  REGION 1..84: note = Description of Unknown:hvTR_O42047 target sequence
MILPDKYPCSISSILISSESMIATFNHKNILQFNHNHLDNHQRLLNNIFDEIHWTPKNLLDATQQFLQHLNIPEDIYTIYILVS

SEQ ID NO: 43815 - protein, 85 aa, unidentified
  REGION 1..85: note = Description of Unknown:vpeps_4B8N_1 target sequence
NRIKTINDHINPRDLSLTEIAKHNTEEDCWVIIKDIVYDLTKFLPDHPGGKKAIILFAGKDATEEFDMLHPPNVLKKYLTPEVVL

SEQ ID NO: 43816 - protein, 85 aa, unidentified
  REGION 1..85: note = Description of Unknown:vpeps_4B8N_1 target sequence
INDHINPRDLSLTEIAKHNTEEDCWVIIKDIVYDLTKFLPDHPGGKKAIILFAGKDATEEFDMLHPPNVLKKYLTPEVVLGPVKK

SEQ ID NO: 43817 - protein, 85 aa, unidentified
  REGION 1..85: note = Description of Unknown:cds_NC_038931.1_cds_YP_009509139.1_23 target sequence
NIVRHRGIVYCDADFIISHRGEAIKDVVGRYPVLCCYNDVCYDPEREGVYDESNIHELRTIKLNDLDINRYPITRGLLFLTNQIV

SEQ ID NO: 43818 - protein, 84 aa, unidentified
  REGION 1..84: note = Description of Unknown:cds_NC_038931.1_cds_YP_009509139.1_23 target sequence
RGIVYCDADFIISHRGEAIKDVVGRYPVLCCYNDVCYDPEREGVYDESNIHELRTIKLNDLDINRYPITRGLLFLTNQIVNAWM

SEQ ID NO: 43819 - protein, 85 aa, unidentified
  REGION 1..85: note = Description of Unknown:cds_NZ_WFIY01000004.1_cds_WP_155862454.1_206 target sequence
RKVRIIELGHFYKYTLKNKWLIKIENKNINFIKNDPIGFVVLDENKQRVGKVLDIIGNVNSPYALIEPFPHYNPPKEVYIELVEK

SEQ ID NO: 43820 - protein, 84 aa, unidentified
  REGION 1..84: note = Description of Unknown:cds_NZ_WFIY01000004.1_cds_WP_155862454.1_206 target sequence
IELGHFYKYTLKNKWLIKIENKNINFIKNDPIGFVVLDENKQRVGKVLDIIGNVNSPYALIEPFPHYNPPKEVYIELVEKVRRK

SEQ ID NO: 43821 - protein, 85 aa, unidentified
  REGION 1..85: note = Description of Unknown:cds_NZ_WFIY01000004.1_cds_WP_048054926.1_246 target sequence
LLRRMKAKVYGRVQGVGFRRFVQINAIRLGIKGYAKNLDDGTVEVVAEGYEEALEKLLDYLRQGPPLAKVEKVDYEMEDYKGEFD

SEQ ID NO: 43822 - protein, 84 aa, unidentified
  REGION 1..84: note = Description of Unknown:cds_NZ_WFIY01000004.1_cds_WP_048054926.1_246 target sequence
AKVYGRVQGVGFRRFVQINAIRLGIKGYAKNLDDGTVEVVAEGYEEALEKLLDYLRQGPPLAKVEKVDYEMEDYKGEFDSFETY

SEQ ID NO: 43823 - protein, 85 aa, unidentified
  REGION 1..85: note = Description of Unknown:cds_NZ_WFIY01000004.1_cds_WP_155864371.1_515 target sequence
ETFLIKDGEITEDDLKIFNEASELIKKAYYNAEKDPNSVINLVKEALTKLESIKPKKPFPPEMRIRFDELKSSLMEILGESKVSQ

SEQ ID NO: 43824 - protein, 84 aa, unidentified
  REGION 1..84: note = Description of Unknown:cds_NZ_WFIY01000004.1_cds_WP_155864371.1_515 target sequence
KDGEITEDDLKIFNEASELIKKAYYNAEKDPNSVINLVKEALTKLESIKPKKPFPPEMRIRFDELKSSLMEILGESKVSQTTSP

SEQ ID NO: 43825 - protein, 85 aa, unidentified
  REGION 1..85: note = Description of Unknown:cds_NZ_WFIY01000004.1_cds_WP_013775794.1_612 target sequence
ENAIVVVVGADKPGIVAGISSKLAEENVNIVDISQTVLRGIFAMIMLVDISKSKVPLSELRKELQQKGKELNVEVLVYHEEVFKY

SEQ ID NO: 43826 - protein, 84 aa, unidentified
  REGION 1..84: note = Description of Unknown:cds_NZ_WFIY01000004.1_cds_WP_013775794.1_612 target sequence
VVVGADKPGIVAGISSKLAEENVNIVDISQTVLRGIFAMIMLVDISKSKVPLSELRKELQQKGKELNVEVLVYHEEVFKYMERI

SEQ ID NO: 43827 - protein, 85 aa, unidentified
  REGION 1..85: note = Description of Unknown:cds_NZ_WFIY01000004.1_cds_WP_155862829.1_658 target sequence
PWISAKGSDKIVYNQCLKLEQGKILRVESFKGDRWIEIKRKKEDEFEITEKGYNNTTYVVSSKELKTLLKRLFEIEFPRSHQVRI

SEQ ID NO: 43828 - protein, 84 aa, unidentified
  REGION 1..84: note = Description of Unknown:cds_NZ_WFIY01000004.1_cds_WP_155862829.1_658 target sequence
KGSDKIVYNQCLKLEQGKILRVESFKGDRWIEIKRKKEDEFEITEKGYNNTTYVVSSKELKTLLKRLFEIEFPRSHQVRISVTS

SEQ ID NO: 43829 - protein, 85 aa, unidentified
  REGION 1..85: note = Description of Unknown:cds_NZ_WFIY01000004.1_cds_WP_155864462.1_1817 target sequence
YEELRKRAEDMGIQITDLVKFYIRQGMEKEEEGENVEKNTECEENIAFLEAKVAQLDAIVGELVRKLKNIEDEDIGEEEVELKER

SEQ ID NO: 43830 - protein, 84 aa, unidentified
  REGION 1..84: note = Description of Unknown:cds_NZ_WFIY01000004.1_cds_WP_155864462.1_1817 target sequence
KRAEDMGIQITDLVKFYIRQGMEKEEEGENVEKNTECEENIAFLEAKVAQLDAIVGELVRKLKNIEDEDIGEEEVELKEREENN

SEQ ID NO: 43831 - protein, 85 aa, unidentified
  REGION 1..85: note = Description of Unknown:cds_NC_005224.1_cds_YP_004928150.1_3 target sequence
NSNLLLPDKNLRMQREQWKWTQMTLIKTHCKPGNKQCQHWRTNSQTTREGWQMLCPGKKWILNLLTRLGLNLMTTSRRDQALGME

SEQ ID NO: 43832 - protein, 84 aa, unidentified
  REGION 1..84: note = Description of Unknown:cds_NC_005224.1_cds_YP_004928150.1_3 target sequence
LPDKNLRMQREQWKWTQMTLIKTHCKPGNKQCQHWRTNSQTTREGWQMLCPGKKWILNLLTRLGLNLMTTSRRDQALGMEMSLM

SEQ ID NO: 43833 - protein, 85 aa, unidentified
  REGION 1..85: note = Description of Unknown:cds_NC_043030.1_cds_YP_009664546.1_11 target sequence
LRYNLLLELARLKPQLYLMAIAPGRPPWETVIKAYSEARGLEREVARITLQTSYRSLKGRVVTKRRSLGKVVLTPAGSWRLYLIE

SEQ ID NO: 43834 - protein, 84 aa, unidentified
  REGION 1..84: note = Description of Unknown:cds_NC_043030.1_cds_YP_009664546.1_11 target sequence
LELARLKPQLYLMAIAPGRPPWETVIKAYSEARGLEREVARITLQTSYRSLKGRVVTKRRSLGKVVLTPAGSWRLYLIEVGRFD

SEQ ID NO: 43835 - protein, 85 aa, unidentified
  REGION 1..85: note = Description of Unknown:vpeps_2ZUG_1 target sequence
ATFQTDADFLLVGDDTSRYEEVMKTFDTVEAVRKSDLDDRVYMVCLKQGSTFVLNGGIEELRLLTGDSTLEIQPMIVPTTELEHH

SEQ ID NO: 43836 - protein, 85 aa, unidentified
  REGION 1..85: note = Description of Unknown:vpeps_2ZUG_1 target sequence
TDADFLLVGDDTSRYEEVMKTFDTVEAVRKSDLDDRVYMVCLKQGSTFVLNGGIEELRLLTGDSTLEIQPMIVPTTELEHHHHHH

SEQ ID NO: 43837 - protein, 85 aa, unidentified
  REGION 1..85: note = Description of Unknown:cds_NC_024711.1_cds_YP_009052516.1_37 target sequence
KKLILFYLPDCNVSKLFEERLHKALALPEFAGRFNLIRYNLYTDTGRQEARSAGISDAPTAYCNGDILRGVQSDYTIRKYLRKLL

SEQ ID NO: 43838 - protein, 84 aa, unidentified
  REGION 1..84: note = Description of Unknown:cds_NC_024711.1_cds_YP_009052516.1_37 target sequence
LFYLPDCNVSKLFEERLHKALALPEFAGRFNLIRYNLYTDTGRQEARSAGISDAPTAYCNGDILRGVQSDYTIRKYLRKLLGKS

SEQ ID NO: 43839 - protein, 85 aa, unidentified
  REGION 1..85: note = Description of Unknown:cds_NC_024711.1_cds_YP_009443004.1_79 target sequence
LIAIFIIAIINLCVTLYLSISRFSVEVNSYNKSDTAINHVRIDSIQLVITERESIVYKLKEHEKDIEDKVISLNDSATWELFKKL

SEQ ID NO: 43840 - protein, 84 aa, unidentified
  REGION 1..84: note = Description of Unknown:cds_NC_024711.1_cds_YP_009443004.1_79 target sequence
FIIAIINLCVTLYLSISRFSVEVNSYNKSDTAINHVRIDSIQLVITERESIVYKLKEHEKDIEDKVISLNDSATWELFKKLVSE

SEQ ID NO: 43841 - protein, 85 aa, unidentified
  REGION 1..85: note = Description of Unknown:cds_NZ_WFIY01000004.1_cds_WP_155862291.1_4 target sequence
ILVLTNPLKIDRKSRSELIVSFKDYSRNYNLRDITGVVILGSSTLIPSGVVSLLSSMNIPLIISNKLGVAVCSPTLVVMLSEVRG

SEQ ID NO: 43842 - protein, 84 aa, unidentified
  REGION 1..84: note = Description of Unknown:cds_NZ_WFIY01000004.1_cds_WP_155862291.1_4 target sequence
TNPLKIDRKSRSELIVSFKDYSRNYNLRDITGVVILGSSTLIPSGVVSLLSSMNIPLIISNKLGVAVCSPTLVVMLSEVRGKAI

SEQ ID NO: 43843 - protein, 85 aa, unidentified
  REGION 1..85: note = Description of Unknown:cds_NZ_WFIY01000004.1_cds_WP_013775337.1_1074 target sequence
ATLYDNEAKIKQAVIILQKIVNDTSVPRNIRRAATDAIRNLQDPNLSAGIRAANAIGILEDISQDPNMPTHTRISIWNVVSILET

SEQ ID NO: 43844 - protein, 84 aa, unidentified
  REGION 1..84: note = Description of Unknown:cds_NZ_WFIY01000004.1_cds_WP_013775337.1_1074 target sequence
DNEAKIKQAVIILQKIVNDTSVPRNIRRAATDAIRNLQDPNLSAGIRAANAIGILEDISQDPNMPTHTRISIWNVVSILETVKD

SEQ ID NO: 43845 - protein, 85 aa, unidentified
  REGION 1..85: note = Description of Unknown:cds_NZ_WFIY01000004.1_cds_WP_155863783.1_1664 target sequence
LRQTFNFNIILLILLIVFLILSIISPVFLLGAIGIGMFKIFGNKTFIPFSILLLLLIGLHGYLYMIGILLALAFIAFNIIKDIYR

SEQ ID NO: 43846 - protein, 84 aa, unidentified
  REGION 1..84: note = Description of Unknown:cds_NZ_WFIY01000004.1_cds_WP_155863783.1_1664 target sequence
FNFNIILLILLIVFLILSIISPVFLLGAIGIGMFKIFGNKTFIPFSILLLLLIGLHGYLYMIGILLALAFIAFNIIKDIYRYYV

SEQ ID NO: 43847 - protein, 85 aa, unidentified
  REGION 1..85: note = Description of Unknown:cds_NZ_WFIY01000004.1_cds_WP_155864341.1_2354 target sequence
LTLRVEVGKKGYIIIPKDIRDLLGIKEGDKLILSIRDGKIVLEPERNVDINEILKRLEGHYAKISSYAKSAKLGDLAHSSLEEEF

SEQ ID NO: 43848 - protein, 84 aa, unidentified
  REGION 1..84: note = Description of Unknown:cds_NZ_WFIY01000004.1_cds_WP_155864341.1_2354 target sequence
EVGKKGYIIIPKDIRDLLGIKEGDKLILSIRDGKIVLEPERNVDINEILKRLEGHYAKISSYAKSAKLGDLAHSSLEEEFDDFS

SEQ ID NO: 43849 - protein, 85 aa, unidentified
  REGION 1..85: note = Description of Unknown:cds_NC_035460.1_cds_YP_009408016.1_65 target sequence
AEILTSKLDSIKKENKFNEIFMDAIINEIENTQPMYIKLFFRFLIDFILLMFVIFACFIRVFRRNYTIIFLTCVTIYVAYVFKLI

SEQ ID NO: 43850 - protein, 84 aa, unidentified
  REGION 1..84: note = Description of Unknown:cds_NC_035460.1_cds_YP_009408016.1_65 target sequence
TSKLDSIKKENKFNEIFMDAIINEIENTQPMYIKLFFRFLIDFILLMFVIFACFIRVFRRNYTIIFLTCVTIYVAYVFKLILLN

SEQ ID NO: 43851 - protein, 85 aa, unidentified
  REGION 1..85: note = Description of Unknown:cds_NC_003214.2_cds_NP_445702.1_37 target sequence
QLTKTQFVRCVFLLLANSKKYTIPQAVRISYRLLDKTRVSLKTKERLLVLLDALESGKITPREFTKRLFLEYPKPSDKVKVLSLK

SEQ ID NO: 43852 - protein, 84 aa, unidentified
  REGION 1..84: note = Description of Unknown:cds_NC_003214.2_cds_NP_445702.1_37 target sequence
TQFVRCVFLLLANSKKYTIPQAVRISYRLLDKTRVSLKTKERLLVLLDALESGKITPREFTKRLFLEYPKPSDKVKVLSLKIFE

SEQ ID NO: 43853 - protein, 85 aa, unidentified
  REGION 1..85: note = Description of Unknown:cds_NC_003214.2_cds_NP_445706.1_41 target sequence
LFEIIYIVSSLFYIVSIIYTLMRIKHINTVAKKEEIRKEIIEYMRSDEVTNIIVKALNESDINKKLNAIVLALCTHVQELKKSKL

SEQ ID NO: 43854 - protein, 84 aa, unidentified
  REGION 1..84: note = Description of Unknown:cds_NC_003214.2_cds_NP_445706.1_41 target sequence
IYIVSSLFYIVSIIYTLMRIKHINTVAKKEEIRKEIIEYMRSDEVTNIIVKALNESDINKKLNAIVLALCTHVQELKKSKLCEG

SEQ ID NO: 43855 - protein, 85 aa, unidentified
  REGION 1..85: note = Description of Unknown:cds_NC_029316.1_cds_YP_009230282.1_29 target sequence
KISTSYDIIKRVLEIESDTPTLINQIYDSVSTFNCRKIGNKKIRCLDIDAPHFIMVNNQISSAISSFREITNNGNDNESEEENEE

SEQ ID NO: 43856 - protein, 84 aa, unidentified
  REGION 1..84: note = Description of Unknown:cds_NC_029316.1_cds_YP_009230282.1_29 target sequence
SYDIIKRVLEIESDTPTLINQIYDSVSTFNCRKIGNKKIRCLDIDAPHFIMVNNQISSAISSFREITNNGNDNESEEENEEIMF

SEQ ID NO: 43857 - protein, 85 aa, unidentified
  REGION 1..85: note = Description of Unknown:cds_NC_038931.1_cds_YP_009509124.1_8 target sequence
LHHIPLFLSSTASPFFIRLIRFLTYSVIFTRSSSSICIVVLMPLLMYIRCPLSAPASAIYTFNCHLLSACQSRLKFVLISTMRPH

SEQ ID NO: 43858 - protein, 84 aa, unidentified
  REGION 1..84: note = Description of Unknown:cds_NC_038931.1_cds_YP_009509124.1_8 target sequence
IPLFLSSTASPFFIRLIRFLTYSVIFTRSSSSICIVVLMPLLMYIRCPLSAPASAIYTFNCHLLSACQSRLKFVLISTMRPHHI

SEQ ID NO: 43859 - protein, 85 aa, unidentified
  REGION 1..85: note = Description of Unknown:cds_NC_002645.1_cds_NP_073553.1_5 target sequence
QGKCWFLENKALKPFVCFYGGDQFLYIGDRIVSYFSTNDLYVALRGRIDKDLSLSRKVELYNGECVYLFCEHPAVGIVNTDFKLE

SEQ ID NO: 43860 - protein, 84 aa, unidentified
  REGION 1..84: note = Description of Unknown:cds_NC_002645.1_cds_NP_073553.1_5 target sequence
CWFLENKALKPFVCFYGGDQFLYIGDRIVSYFSTNDLYVALRGRIDKDLSLSRKVELYNGECVYLFCEHPAVGIVNTDFKLEIH

SEQ ID NO: 43861 - protein, 85 aa, unidentified
  REGION 1..85: note = Description of Unknown:cds_NC_024711.1_cds_YP_009443000.1_29 target sequence
TSEIDKLKHFHVENYSGTNFTDDLNDGEEFLYTTIRCKDDKEVTLLCKYVKNKHIGNCPNCIFNKYLCYGLLCNIVVLKVVKDEE

SEQ ID NO: 43862 - protein, 84 aa, unidentified
  REGION 1..84: note = Description of Unknown:cds_NC_024711.1_cds_YP_009443000.1_29 target sequence
IDKLKHFHVENYSGTNFTDDLNDGEEFLYTTIRCKDDKEVTLLCKYVKNKHIGNCPNCIFNKYLCYGLLCNIVVLKVVKDEEIY

SEQ ID NO: 43863 - protein, 85 aa, unidentified
  REGION 1..85: note = Description of Unknown:cds_NZ_WFIY01000004.1_cds_WP_155862439.1_186 target sequence
NKPLEVVVSRSKSVEDHVLEIIEILNHNSNEVDLKGYGFEINKAVDIYNALKDRLKEGITLEEVSIGSETKDRKRISYLLLRIKR

SEQ ID NO: 43864 - protein, 84 aa, unidentified
  REGION 1..84: note = Description of Unknown:cds_NZ_WFIY01000004.1_cds_WP_155862439.1_186 target sequence
LEVVVSRSKSVEDHVLEIIEILNHNSNEVDLKGYGFEINKAVDIYNALKDRLKEGITLEEVSIGSETKDRKRISYLLLRIKRSY

SEQ ID NO: 43865 - protein, 85 aa, unidentified
  REGION 1..85: note = Description of Unknown:cds_NZ_WFIY01000004.1_cds_WP_155862545.1_313 target sequence
KEKDNFEMVINLRKIATGKRTNRLGRALKEIRSKIIRHFGADRVLIDPLVVKSLSTNGYDKIKSRIRVVVSKLDEKTYLVKLAIK

SEQ ID NO: 43866 - protein, 84 aa, unidentified
  REGION 1..84: note = Description of Unknown:cds_NZ_WFIY01000004.1_cds_WP_155862545.1_313 target sequence
DNFEMVINLRKIATGKRTNRLGRALKEIRSKIIRHFGADRVLIDPLVVKSLSTNGYDKIKSRIRVVVSKLDEKTYLVKLAIKSE

SEQ ID NO: 43867 - protein, 85 aa, unidentified
  REGION 1..85: note = Description of Unknown:cds_NZ_WFIY01000004.1_cds_WP_155862797.1_617 target sequence
FAIITLYANNGTPAYIIKVPFAYGSSVGDAVPAIYCFNLVDSFMGYPIHHGVYLNQIYVRQVLLLLIVNVTNGKIIREYNRIWSF

SEQ ID NO: 43868 - protein, 84 aa, unidentified
  REGION 1..84: note = Description of Unknown:cds_NZ_WFIY01000004.1_cds_WP_155862797.1_617 target sequence
ITLYANNGTPAYIIKVPFAYGSSVGDAVPAIYCFNLVDSFMGYPIHHGVYLNQIYVRQVLLLLIVNVTNGKIIREYNRIWSFWR

SEQ ID NO: 43869 - protein, 85 aa, unidentified
  REGION 1..85: note = Description of Unknown:cds_NZ_WFIY01000004.1_cds_WP_155863118.1_1037 target sequence
YEIKVVLESIRDGAVNPGEVVIRTKIPRYEVLAIFHILEGLGLIETIYSKGSHKVYKLTQKGEEILEALEKGHEIDIVTKESKDA

SEQ ID NO: 43870 - protein, 84 aa, unidentified
  REGION 1..84: note = Description of Unknown:cds_NZ_WFIY01000004.1_cds_WP_155863118.1_1037 target sequence
KVVLESIRDGAVNPGEVVIRTKIPRYEVLAIFHILEGLGLIETIYSKGSHKVYKLTQKGEEILEALEKGHEIDIVTKESKDALI

SEQ ID NO: 43871 - protein, 85 aa, unidentified
  REGION 1..85: note = Description of Unknown:cds_NZ_WFIY01000004.1_cds_WP_155863415.1_1397 target sequence
EEWGFSISGLYISTNFQPLSFPNTIFQILVDEEFGNLIVEFKRDVKKSFEGEAFVTIGVDENGRISYISIEPLDKDLKEGVKGIK

SEQ ID NO: 43872 - protein, 84 aa, unidentified
  REGION 1..84: note = Description of Unknown:cds_NZ_WFIY01000004.1_cds_WP_155863415.1_1397 target sequence
GFSISGLYISTNFQPLSFPNTIFQILVDEEFGNLIVEFKRDVKKSFEGEAFVTIGVDENGRISYISIEPLDKDLKEGVKGIKNE

SEQ ID NO: 43873 - protein, 85 aa, unidentified
  REGION 1..85: note = Description of Unknown:cds_NZ_WFIY01000004.1_cds_WP_155864321.1_2324 target sequence
PTISIRIDEKLKRKMDELSYINWSEVIRRKIEEVVEEEEKKRREDGKKKKDLERIKNASLRSYEFFLNYGGRKSEETIREWRDKN

SEQ ID NO: 43874 - protein, 84 aa, unidentified
  REGION 1..84: note = Description of Unknown:cds_NZ_WFIY01000004.1_cds_WP_155864321.1_2324 target sequence
SIRIDEKLKRKMDELSYINWSEVIRRKIEEVVEEEEKKRREDGKKKKDLERIKNASLRSYEFFLNYGGRKSEETIREWRDKNWQ

SEQ ID NO: 43875 - protein, 85 aa, unidentified
  REGION 1..85: note = Description of Unknown:cds_NC_003214.2_cds_NP_445692.1_27 target sequence
EEFIIKIAGTKGISNFKSYHFSIISNYENFFNFILPKDVKDVLVVLPFDEEKTKTIKHAITNARSNVSVTIMYSGKIRDEMIIGW

SEQ ID NO: 43876 - protein, 84 aa, unidentified
  REGION 1..84: note = Description of Unknown:cds_NC_003214.2_cds_NP_445692.1_27 target sequence
IIKIAGTKGISNFKSYHFSIISNYENFFNFILPKDVKDVLVVLPFDEEKTKTIKHAITNARSNVSVTIMYSGKIRDEMIIGWRT

SEQ ID NO: 43877 - protein, 85 aa, unidentified
  REGION 1..85: note = Description of Unknown:cds_NC_029316.1_cds_YP_009230271.1_18 target sequence
YLTIKFLPFEVKIRNIDQGLMVIPTTDGKYILVNFTIDGDFAEIYDDLKELIKKVKEYYGDDIAKVVINELREYYGDDIVENETI

SEQ ID NO: 43878 - protein, 84 aa, unidentified
  REGION 1..84: note = Description of Unknown:cds_NC_029316.1_cds_YP_009230271.1_18 target sequence
IKFLPFEVKIRNIDQGLMVIPTTDGKYILVNFTIDGDFAEIYDDLKELIKKVKEYYGDDIAKVVINELREYYGDDIVENETIQN

SEQ ID NO: 43879 - protein, 85 aa, unidentified
  REGION 1..85: note = Description of Unknown:cds_NC_035464.1_cds_YP_009408156.1_10 target sequence
VSNRELAKRLSQSAREAWNSEEGMRIREELSADSASYGACLRRVMESGGGSRGYKDCARRSGIGTAFASVWGSTKAYGRPMVEVV

SEQ ID NO: 43880 - protein, 84 aa, unidentified
  REGION 1..84: note = Description of Unknown:cds_NC_035464.1_cds_YP_009408156.1_10 target sequence
RELAKRLSQSAREAWNSEEGMRIREELSADSASYGACLRRVMESGGGSRGYKDCARRSGIGTAFASVWGSTKAYGRPMVEVVAR

SEQ ID NO: 43881 - protein, 85 aa, unidentified
  REGION 1..85: note = Description of Unknown:cds_NC_010495.1_cds_YP_001742047.1_10 target sequence
QNCKRFRLTHSKGLMLRAMMLLMLLLSLAGCNSNSQTSASSSSDIPPLSPLAIQPQKPEFCLETCSANLSKEIDNWQITLTGQER

SEQ ID NO: 43882 - protein, 84 aa, unidentified
  REGION 1..84: note = Description of Unknown:cds_NC_010495.1_cds_YP_001742047.1_10 target sequence
KRFRLTHSKGLMLRAMMLLMLLLSLAGCNSNSQTSASSSSDIPPLSPLAIQPQKPEFCLETCSANLSKEIDNWQITLTGQERRD

SEQ ID NO: 43883 - protein, 85 aa, unidentified
  REGION 1..85: note = Description of Unknown:hvTR_Q9QJ22 target sequence
NSALNEIKDDFENCETKNDLFKIIDKISKNCNFIVEQVESLPRRVDSAAILFDNLAVEIFNDVIYRQNGDGVAAKIRQGNGQNID

SEQ ID NO: 43884 - protein, 84 aa, unidentified
  REGION 1..84: note = Description of Unknown:hvTR_Q9QJ22 target sequence
ALNEIKDDFENCETKNDLFKIIDKISKNCNFIVEQVESLPRRVDSAAILFDNLAVEIFNDVIYRQNGDGVAAKIRQGNGQNIDT

SEQ ID NO: 43885 - protein, 85 aa, unidentified
  REGION 1..85: note = Description of Unknown:hvTR_P18100 target sequence
TEAPTEFPPEDGTPRRDLGSDWVIETLREIKEEALRHFDPRLLIALGYYIHNRHGDTLEGARELIKTLQRALFVHFRAGCNRSRI

SEQ ID NO: 43886 - protein, 84 aa, unidentified
  REGION 1..84: note = Description of Unknown:hvTR_P18100 target sequence
APTEFPPEDGTPRRDLGSDWVIETLREIKEEALRHFDPRLLIALGYYIHNRHGDTLEGARELIKTLQRALFVHFRAGCNRSRIG

SEQ ID NO: 43887 - protein, 85 aa, unidentified
  REGION 1..85: note = Description of Unknown:cds_NZ_WFIY01000004.1_cds_WP_155862543.1_311 target sequence
EEIKVYMVKGTALFNESRFPTRQKFIKFVRALNEKQAAEYIYAYFGSKNKIKRHNIKIEEIKEIPLDEVPDRRIKDIAKLDKIIL

SEQ ID NO: 43888 - protein, 84 aa, unidentified
  REGION 1..84: note = Description of Unknown:cds_NZ_WFIY01000004.1_cds_WP_155862543.1_311 target sequence
IKVYMVKGTALFNESRFPTRQKFIKFVRALNEKQAAEYIYAYFGSKNKIKRHNIKIEEIKEIPLDEVPDRRIKDIAKLDKIILM

SEQ ID NO: 43889 - protein, 85 aa, unidentified
  REGION 1..85: note = Description of Unknown:cds_NZ_WFIY01000004.1_cds_482 target sequence
FKVELIIINKEGIRDPEGEAIKNYIINKVTDKVKEVKAGKYLSFSVDVKEESEAIELVKKIAYEDRLYNPIVHRIIVRAEKIENG

SEQ ID NO: 43890 - protein, 84 aa, unidentified
  REGION 1..84: note = Description of Unknown:cds_NZ_WFIY01000004.1_cds_482 target sequence
ELIIINKEGIRDPEGEAIKNYIINKVTDKVKEVKAGKYLSFSVDVKEESEAIELVKKIAYEDRLYNPIVHRIIVRAEKIENGSN

SEQ ID NO: 43891 - protein, 85 aa, unidentified
  REGION 1..85: note = Description of Unknown:cds_NZ_WFIY01000004.1_cds_WP_155862889.1_734 target sequence
PKPQFRSRSYRKIHIRTPSGESTLHFERRKNKLAHCAMCGNPLNAVKTNKIYSFSLSEKRPERPFGGYLCHKCLENLIKLSVRGI

SEQ ID NO: 43892 - protein, 84 aa, unidentified
  REGION 1..84: note = Description of Unknown:cds_NZ_WFIY01000004.1_cds_WP_155862889.1_734 target sequence
PQFRSRSYRKIHIRTPSGESTLHFERRKNKLAHCAMCGNPLNAVKTNKIYSFSLSEKRPERPFGGYLCHKCLENLIKLSVRGIS

SEQ ID NO: 43893 - protein, 85 aa, unidentified
  REGION 1..85: note = Description of Unknown:cds_NZ_WFIY01000004.1_cds_WP_013775406.1_1007 target sequence
LQAKVENPLKNIKSAVNKIVLVKLKDGSEYIGKLEQTDGTMNLVLRDCTELREGTAEPVAKYGRVLIRGSNVLFISIDYETIMNK

SEQ ID NO: 43894 - protein, 84 aa, unidentified
  REGION 1..84: note = Description of Unknown:cds_NZ_WFIY01000004.1_cds_WP_013775406.1_1007 target sequence
KVENPLKNIKSAVNKIVLVKLKDGSEYIGKLEQTDGTMNLVLRDCTELREGTAEPVAKYGRVLIRGSNVLFISIDYETIMNKEK

SEQ ID NO: 43895 - protein, 85 aa, unidentified
  REGION 1..85: note = Description of Unknown:cds_NZ_WFIY01000004.1_cds_WP_155863340.1_1307 target sequence
KFCPKCGSYMKPKGNSMVCPKCGYKEEGVENITFTEKKSHDRDVTIVADGRRIKGGIALNLCPRCGNAVVIKIGKKYKCRACGYI

SEQ ID NO: 43896 - protein, 84 aa, unidentified
  REGION 1..84: note = Description of Unknown:cds_NZ_WFIY01000004.1_cds_WP_155863340.1_1307 target sequence
CPKCGSYMKPKGNSMVCPKCGYKEEGVENITFTEKKSHDRDVTIVADGRRIKGGIALNLCPRCGNAVVIKIGKKYKCRACGYIF

SEQ ID NO: 43897 - protein, 85 aa, unidentified
  REGION 1..85: note = Description of Unknown:cds_NZ_WFIY01000004.1_cds_WP_205737150.1_1948 target sequence
LMYSLNFTREWDSALFEFTKSLKERLGNNLVMIIGLDENEKVYDSNVLVVVKNKTDDVIMSIADVALDVNSKYNCSINFYVIQNG

SEQ ID NO: 43898 - protein, 84 aa, unidentified
  REGION 1..84: note = Description of Unknown:cds_NZ_WFIY01000004.1_cds_WP_205737150.1_1948 target sequence
SLNFTREWDSALFEFTKSLKERLGNNLVMIIGLDENEKVYDSNVLVVVKNKTDDVIMSIADVALDVNSKYNCSINFYVIQNGQS

SEQ ID NO: 43899 - protein, 85 aa, unidentified
  REGION 1..85: note = Description of Unknown:cds_NZ_WFIY01000004.1_cds_WP_155864218.1_2186 target sequence
KLQYDYQYFPISIPDKGAGGKTGNWRVVKPVISKEKCIQCKACYLWCPESTIHIDNEVYIDYEYCKGCGVCASVCPVKAISMVME

SEQ ID NO: 43900 - protein, 84 aa, unidentified
  REGION 1..84: note = Description of Unknown:cds_NZ_WFIY01000004.1_cds_WP_155864218.1_2186 target sequence
QYDYQYFPISIPDKGAGGKTGNWRVVKPVISKEKCIQCKACYLWCPESTIHIDNEVYIDYEYCKGCGVCASVCPVKAISMVMEQ

SEQ ID NO: 43901 - protein, 85 aa, unidentified
  REGION 1..85: note = Description of Unknown:cds_NZ_WFIY01000004.1_cds_WP_155864347.1_2361 target sequence
LWEPIIKLDFSPGSKIKFPISTAGYKIYRSKRKLKADVDIAGGGKIVEYVEIPDQTTGLIINRKILAYYIPYSWNPNTWGIYIIK

SEQ ID NO: 43902 - protein, 84 aa, unidentified
  REGION 1..84: note = Description of Unknown:cds_NZ_WFIY01000004.1_cds_WP_155864347.1_2361 target sequence
EPIIKLDFSPGSKIKFPISTAGYKIYRSKRKLKADVDIAGGGKIVEYVEIPDQTTGLIINRKILAYYIPYSWNPNTWGIYIIKN

SEQ ID NO: 43903 - protein, 85 aa, unidentified
  REGION 1..85: note = Description of Unknown:cds_NC_035460.1_cds_YP_009408087.1_136 target sequence
EKLRRCILKLFCIYHKDTNSECEYNKDELENYDDKISITSSISNDSVFINPTKNTGYCYRGVNFISASPSQSTCSWFYMHPEYSG

SEQ ID NO: 43904 - protein, 84 aa, unidentified
  REGION 1..84: note = Description of Unknown:cds_NC_035460.1_cds_YP_009408087.1_136 target sequence
LRRCILKLFCIYHKDTNSECEYNKDELENYDDKISITSSISNDSVFINPTKNTGYCYRGVNFISASPSQSTCSWFYMHPEYSGY

SEQ ID NO: 43905 - protein, 85 aa, unidentified
  REGION 1..85: note = Description of Unknown:cds_NC_029316.1_cds_YP_009230337.1_84 target sequence
ETPIRRYYIATMTENERNFANRVLRTLNSIADPRTGIVDIDWTELINAVRILTGLEAIDSYKLLKKMEEFGAIQLKPFVRVLRSE

SEQ ID NO: 43906 - protein, 84 aa, unidentified
  REGION 1..84: note = Description of Unknown:cds_NC_029316.1_cds_YP_009230337.1_84 target sequence
PIRRYYIATMTENERNFANRVLRTLNSIADPRTGIVDIDWTELINAVRILTGLEAIDSYKLLKKMEEFGAIQLKPFVRVLRSEI

SEQ ID NO: 43907 - protein, 85 aa, unidentified
  REGION 1..85: note = Description of Unknown:cds_NC_010495.1_cds_YP_001742048.1_11 target sequence
LTAQFAQKNWRLNNVILRYHHRATKRELHQCLGSMLMSRQHYQLNDPPKPSAWCEQMERNAKDGDEAYAYFQLKQMWKQQENSEQ

SEQ ID NO: 43908 - protein, 84 aa, unidentified
  REGION 1..84: note = Description of Unknown:cds_NC_010495.1_cds_YP_001742048.1_11 target sequence
QFAQKNWRLNNVILRYHHRATKRELHQCLGSMLMSRQHYQLNDPPKPSAWCEQMERNAKDGDEAYAYFQLKQMWKQQENSEQTN

SEQ ID NO: 43909 - protein, 85 aa, unidentified
  REGION 1..85: note = Description of Unknown:hvTR_P04608 target sequence
EPVDPRLEPWKHPGSQPKTACTNCYCKKCCFHCQVCFITKALGISYGRKKRRQRRRAHQNSQTHQASLSKQPTSQPRGDPTGPKE

SEQ ID NO: 43910 - protein, 84 aa, unidentified
  REGION 1..84: note = Description of Unknown:hvTR_P04608 target sequence
PVDPRLEPWKHPGSQPKTACTNCYCKKCCFHCQVCFITKALGISYGRKKRRQRRRAHQNSQTHQASLSKQPTSQPRGDPTGPKE

SEQ ID NO: 43911 - protein, 85 aa, unidentified
  REGION 1..85: note = Description of Unknown:hvTR_Q6LDW4 target sequence
EPVDPRLEPWKHPGSQPKTACTNCYCKKCCFHCQVCFITKALGISYGRKKRRQRRRPPQGSQTHQVSLSKQPTSQSRGDPTGPKE

SEQ ID NO: 43912 - protein, 84 aa, unidentified
  REGION 1..84: note = Description of Unknown:hvTR_Q6LDW4 target sequence
PVDPRLEPWKHPGSQPKTACTNCYCKKCCFHCQVCFITKALGISYGRKKRRQRRRPPQGSQTHQVSLSKQPTSQSRGDPTGPKE

SEQ ID NO: 43913 - protein, 85 aa, unidentified
  REGION 1..85: note = Description of Unknown:cds_NZ_WFIY01000004.1_cds_WP_155862737.1_544 target sequence
ALELENLERRYLDEKGFRIYERPANGYEIAFRYIPINSVKEIIVYKIENGKETQIAQFSSLDNPLDVAKSLEEYPQGLTQEFFNY

SEQ ID NO: 43914 - protein, 84 aa, unidentified
  REGION 1..84: note = Description of Unknown:cds_NZ_WFIY01000004.1_cds_WP_155862737.1_544 target sequence
LELENLERRYLDEKGFRIYERPANGYEIAFRYIPINSVKEIIVYKIENGKETQIAQFSSLDNPLDVAKSLEEYPQGLTQEFFNY

SEQ ID NO: 43915 - protein, 85 aa, unidentified
  REGION 1..85: note = Description of Unknown:cds_NZ_WFIY01000004.1_cds_WP_155862902.1_752 target sequence
KRPLDLIGLKVKVLSHSNPFFIGLSGVIVFESPKFLYIKSSKGKVLMVYKADGIFEIDFKGSHQIMHGYKLMGNIVKRLKKRWTK

SEQ ID NO: 43916 - protein, 84 aa, unidentified
  REGION 1..84: note = Description of Unknown:cds_NZ_WFIY01000004.1_cds_WP_155862902.1_752 target sequence
RPLDLIGLKVKVLSHSNPFFIGLSGVIVFESPKFLYIKSSKGKVLMVYKADGIFEIDFKGSHQIMHGYKLMGNIVKRLKKRWTK

SEQ ID NO: 43917 - protein, 85 aa, unidentified
  REGION 1..85: note = Description of Unknown:cds_NZ_WFIY01000004.1_cds_WP_205737139.1_1264 target sequence
VLGALVKFAIKRLIDGIITLFLLVLFVFILIHAAAPNPAALARIYAGNPHAPPSEIQQIINEYVLNKPTLLIRHYKRKWWRRHIV

SEQ ID NO: 43918 - protein, 84 aa, unidentified
  REGION 1..84: note = Description of Unknown:cds_NZ_WFIY01000004.1_cds_WP_205737139.1_1264 target sequence
LGALVKFAIKRLIDGIITLFLLVLFVFILIHAAAPNPAALARIYAGNPHAPPSEIQQIINEYVLNKPTLLIRHYKRKWWRRHIV

SEQ ID NO: 43919 - protein, 85 aa, unidentified
  REGION 1..85: note = Description of Unknown:cds_NZ_WFIY01000004.1_cds_WP_155863331.1_1297 target sequence
LIGNILAIIIGSYNLSKRYKEEGFRTVAYLFIIVLILSLFNIPSNIFTISLLNTLPKIFTIISSIIYFIGIKLIYTSASNVLKRF

SEQ ID NO: 43920 - protein, 84 aa, unidentified
  REGION 1..84: note = Description of Unknown:cds_NZ_WFIY01000004.1_cds_WP_155863331.1_1297 target sequence
GNILAIIIGSYNLSKRYKEEGFRTVAYLFIIVLILSLFNIPSNIFTISLLNTLPKIFTIISSIIYFIGIKLIYTSASNVLKRFQ

SEQ ID NO: 43921 - protein, 85 aa, unidentified
  REGION 1..85: note = Description of Unknown:cds_NZ_WFIY01000004.1_cds_WP_155863741.1_1611 target sequence
VKKIYVFYTPKRIVNSEDYEVEILEKVSKKFKLGRLLRYDSVSYDKGGITYLKGIFERGKAIVKFKEGGEAIALVKKYKRTFRIW

SEQ ID NO: 43922 - protein, 84 aa, unidentified
  REGION 1..84: note = Description of Unknown:cds_NZ_WFIY01000004.1_cds_WP_155863741.1_1611 target sequence
KIYVFYTPKRIVNSEDYEVEILEKVSKKFKLGRLLRYDSVSYDKGGITYLKGIFERGKAIVKFKEGGEAIALVKKYKRTFRIWI

SEQ ID NO: 43923 - protein, 85 aa, unidentified
  REGION 1..85: note = Description of Unknown:cds_NZ_WFIY01000004.1_cds_WP_155864090.1_2035 target sequence
INYPVPLGRPKIGSSGLTGHWRLMKPVIDYSKCTKCRLCVIYCPENTIDLLEGFDVRIDYDYCKGCGVCAQICPQKAIQMVPEVK

SEQ ID NO: 43924 - protein, 84 aa, unidentified
  REGION 1..84: note = Description of Unknown:cds_NZ_WFIY01000004.1_cds_WP_155864090.1_2035 target sequence
NYPVPLGRPKIGSSGLTGHWRLMKPVIDYSKCTKCRLCVIYCPENTIDLLEGFDVRIDYDYCKGCGVCAQICPQKAIQMVPEVK

SEQ ID NO: 43925 - protein, 85 aa, unidentified
  REGION 1..85: note = Description of Unknown:cds_NZ_WFIY01000004.1_cds_WP_013776497.1_2228 target sequence
EELNLVSLECPEPFLKVSAKIMEMKGGEQLKVLYKDPKCDEMLLQLMDLANCKVLQHEEKDGVFTLIIEKKGEKKKVDLSDFTGC

SEQ ID NO: 43926 - protein, 84 aa, unidentified
  REGION 1..84: note = Description of Unknown:cds_NZ_WFIY01000004.1_cds_WP_013776497.1_2228 target sequence
ELNLVSLECPEPFLKVSAKIMEMKGGEQLKVLYKDPKCDEMLLQLMDLANCKVLQHEEKDGVFTLIIEKKGEKKKVDLSDFTGC

SEQ ID NO: 43927 - protein, 85 aa, unidentified
  REGION 1..85: note = Description of Unknown:cds_NZ_WFIY01000004.1_cds_WP_155864288.1_2281 target sequence
KVISVKVPEEIYEKMKMHKEINWSEVIRNAIISELNELEGITTGNELMERLRRLGVDEKDINVEPPQGEDEFQRELKKRSTIRTP

SEQ ID NO: 43928 - protein, 84 aa, unidentified
  REGION 1..84: note = Description of Unknown:cds_NZ_WFIY01000004.1_cds_WP_155864288.1_2281 target sequence
VISVKVPEEIYEKMKMHKEINWSEVIRNAIISELNELEGITTGNELMERLRRLGVDEKDINVEPPQGEDEFQRELKKRSTIRTP

SEQ ID NO: 43929 - protein, 85 aa, unidentified
  REGION 1..85: note = Description of Unknown:cds_NZ_WFIY01000004.1_cds_WP_162309172.1_2297 target sequence
VFKDVQWIDNDKFRLLINGILVTYKVEIQFGTITKVILRGLNYNSVCNLEIDMRNNKLFSLECIGFEKDQVKKAILSKLAVQIPK

SEQ ID NO: 43930 - protein, 84 aa, unidentified
  REGION 1..84: note = Description of Unknown:cds_NZ_WFIY01000004.1_cds_WP_162309172.1_2297 target sequence
KDVQWIDNDKFRLLINGILVTYKVEIQFGTITKVILRGLNYNSVCNLEIDMRNNKLFSLECIGFEKDQVKKAILSKLAVQIPKL

SEQ ID NO: 43931 - protein, 85 aa, unidentified
  REGION 1..85: note = Description of Unknown:cds_NC_029316.1_cds_YP_009230319.1_66 target sequence
SNICELLKVEYEQNMQKYNIPDRWKAVAYNVLVKLGYYDEEGNKIKDDAEFINKVSRIAEKLDSLHVSKINKMMKICGEAIGESN

SEQ ID NO: 43932 - protein, 84 aa, unidentified
  REGION 1..84: note = Description of Unknown:cds_NC_029316.1_cds_YP_009230319.1_66 target sequence
NICELLKVEYEQNMQKYNIPDRWKAVAYNVLVKLGYYDEEGNKIKDDAEFINKVSRIAEKLDSLHVSKINKMMKICGEAIGESN

SEQ ID NO: 43933 - protein, 85 aa, unidentified
  REGION 1..85: note = Description of Unknown:cds_NC_007409.1_cds_YP_319855.1_24 target sequence
LSNSTSRNRHSKHNKKNTREDFDGYYFNKNVVICDDKGQKITAKVYKTSKYWLMLKTSDGKTIFMNKAFIKSIELAEEEEKDDLA

SEQ ID NO: 43934 - protein, 84 aa, unidentified
  REGION 1..84: note = Description of Unknown:cds_NC_007409.1_cds_YP_319855.1_24 target sequence
SNSTSRNRHSKHNKKNTREDFDGYYFNKNVVICDDKGQKITAKVYKTSKYWLMLKTSDGKTIFMNKAFIKSIELAEEEEKDDLA

SEQ ID NO: 43935 - protein, 84 aa, unidentified
  REGION 1..84: note = Description of Unknown:hvTR_P24439 target sequence
NSALNGIKDDFENCETKDDLFKIIDKISKNCNFIVEQVESLPRRVDSAAILFDNLAVEIFNDVIYRQNGVAAKIRQGNGQDIDT

SEQ ID NO: 43936 - protein, 84 aa, unidentified
  REGION 1..84: note = Description of Unknown:cds_NC_024711.1_cds_YP_009052484.1_1 target sequence
KSYNESYSENNSNGNNNEDEGKGYIDNEEKSKYNGNDNEDENKDNNGNDNGNSKSENNVYWCFGEASEYKGWVIKLVLTTPVKF

SEQ ID NO: 43937 - protein, 84 aa, unidentified
  REGION 1..84: note = Description of Unknown:cds_NZ_WFIY01000004.1_cds_WP_155862400.1_137 target sequence
VKLINWKKAPREERVKAKRLLKEDDYDIYIILLQNRKFVEYFKSHDIDSGEKLLIRKEKKGNVMKEIKRLKEEGFSIKLVIFSL

SEQ ID NO: 43938 - protein, 84 aa, unidentified
  REGION 1..84: note = Description of Unknown:cds_NZ_WFIY01000004.1_cds_WP_155862741.1_551 target sequence
AKDVLGILGDYEPKGKTIKGVGKFILWGLDDPFHITTVSGALIYGVGKIIESRSPYGIRRAKMDLAEIKRQMRELILDISSLRV

SEQ ID NO: 43939 - protein, 84 aa, unidentified
  REGION 1..84: note = Description of Unknown:cds_NZ_WFIY01000004.1_cds_WP_155862801.1_623 target sequence
MSSAEDPDVDILNKNGLVNIYVDLRGKEINTKRLLVRADNSHIYIYDPDSNSIVKIIYVNELIDPSTLSVSEKNGIINISLKKT

SEQ ID NO: 43940 - protein, 84 aa, unidentified
  REGION 1..84: note = Description of Unknown:cds_NZ_WFIY01000004.1_cds_WP_155864392.1_931 target sequence
SLIFIGFALLFISALSCTVSTPSTSSTAVGGLVLIGPFPIFFGVGPKNELLPLTIFGIIFTVIAIIFFILTFYMFRKWSQRPEI

SEQ ID NO: 43941 - protein, 84 aa, unidentified
  REGION 1..84: note = Description of Unknown:cds_NZ_WFIY01000004.1_cds_WP_155864121.1_2072 target sequence
ERKKEISEECLYYKEIPRSLISNYEKFFNFVLPKNVEDKEIIISVPETLFHEIEMIRNSISKVRKFKTVIITLDKSSNISICMK

SEQ ID NO: 43942 - protein, 84 aa, unidentified; identical to SEQ ID NO: 40160
  REGION 1..84: note = Description of Unknown:cds_NZ_WFIY01000003.1_cds_WP_155862287.1_2372 target sequence

SEQ ID NO: 43943 - protein, 85 aa, unidentified
  REGION 1..85: note = Description of Unknown:cds_NC_029316.1_cds_YP_009230254.1_1 target sequence
VGHAEPTRGALGGSHRGVASPPARSPSAQGFSPAGWGIPLPPRAKPAVSSSRPPRVGEVFALSPLPWGTRDTGSLCPTLLRLSEG

SEQ ID NO: 43944 - protein, 84 aa, unidentified
  REGION 1..84: note = Description of Unknown:cds_NC_029316.1_cds_YP_009230254.1_1 target sequence
GHAEPTRGALGGSHRGVASPPARSPSAQGFSPAGWGIPLPPRAKPAVSSSRPPRVGEVFALSPLPWGTRDTGSLCPTLLRLSEG

SEQ ID NO: 43945 - protein, 84 aa, unidentified
  REGION 1..84: note = Description of Unknown:cds_NC_029316.1_cds_YP_009230272.1_19 target sequence
VKVKIPYKFLEENTWCDSDYYGCSGSCSHCYPYAENTVYEADIDDVKFDRIDLEDIVDEYLDDIIDILMTKHRKELERRMNNGT

SEQ ID NO: 43946 - protein, 84 aa, unidentified
  REGION 1..84: note = Description of Unknown:cds_NC_029316.1_cds_YP_009230315.1_62 target sequence
SQEFVSKDQEGEESISSNLLNADWDYVEELIESFLNDHMRTWNKYSYFVIDSDTMLIKVYGGDEPTFTIKARLVGGKLEVVDVR

SEQ ID NO: 43947 - protein, 84 aa, unidentified
  REGION 1..84: note = Description of Unknown:cds_NC_030656.1_cds_YP_009268829.1_114 target sequence
SSEQVGIIDESAGYKKKRKRRPPRTTVVEDEDSCTTCSSCHSLLVKVADITKVSLNGLKLAGSGSVLECAACGSALRPLNEFYS

SEQ ID NO: 43948 - protein, 84 aa, unidentified
  REGION 1..84: note = Description of Unknown:cds_NC_030656.1_cds_YP_009268848.1_133 target sequence
SFISCLRSCSDDYEENQVVVTNSIIYTDKMPKNFVEPIDCKKYNYVLCTTVDGKSNSSRNRRRRVINNANVTNSIILAKLRLVK

SEQ ID NO: 43949 - protein, 84 aa, unidentified
  REGION 1..84: note = Description of Unknown:cds_NC_009884.1_cds_YP_001496932.1_7 target sequence
SNYEILDKIRERIEKEFIMARQSRIDVVLMPMNEYSGYFYTIYTVEYTDVSNEFSSVMLTQGEYIILKNSVLVKIGDKVKQLEL

SEQ ID NO: 43950 - protein, 85 aa, unidentified
  REGION 1..85: note = Description of Unknown:cds_NC_043030.1_cds_YP_009664537.1_2 target sequence
VKSWVKCVGPRGEELYLWIWQTWEDYHSLRMLHRLEGEVCFEVQDPNHKGGPKREDTHKGGLGHSKQNTQSIYKRGGPREGPESA

SEQ ID NO: 43951 - protein, 84 aa, unidentified
  REGION 1..84: note = Description of Unknown:cds_NC_043030.1_cds_YP_009664537.1_2 target sequence
KSWVKCVGPRGEELYLWIWQTWEDYHSLRMLHRLEGEVCFEVQDPNHKGGPKREDTHKGGLGHSKQNTQSIYKRGGPREGPESA

SEQ ID NO: 43952 - protein, 85 aa, unidentified
  REGION 1..85: note = Description of Unknown:vpeps_2GJ2_1 target sequence
GSHMATFQTDADFLLVGDDTSRYEEVMKTFDTVEAVRKSDLDDRVYMVCLKQGSTFVLNGGIEELRLLTGDSTLEIQPMIVPTTE

SEQ ID NO: 43953 - protein, 84 aa, unidentified
  REGION 1..84: note = Description of Unknown:cds_NZ_WFIY01000004.1_cds_WP_155862597.1_373 target sequence
LKVEVDIQIQSQYAKEIINSLKVDNINIPQGMQIDMNYNGNYANIKIIMEISSFKDILTLRNTADEILEHANLIINLLENKRIA

SEQ ID NO: 43954 - protein, 85 aa, unidentified
  REGION 1..85: note = Description of Unknown:random_neg_ctrl neg_ctrl sequence
DILDPWLNISYFLTKYCEEDTCPGIVYNNTDDGPREKRDYRSQYGLPSPYNLFLMFVVNFTFNGGEGPSKTKGKLEIDDAEPTKP

SEQ ID NO: 43955 - protein, 85 aa, unidentified
  REGION 1..85: note = Description of Unknown:random_neg_ctrl neg_ctrl sequence
ILIPIDVKGSGVNILADYYFPDLLGLVLKLTKVGISELIRMKKLNINDIPITDFQIVVLNCPKIGLKAKYSELSVSFKTLMEVGK

SEQ ID NO: 43956 - protein, 84 aa, unidentified
  REGION 1..84: note = Description of Unknown:random_neg_ctrl neg_ctrl sequence
GTLSLVGYGIGGRAGQKPHKEVKIMRNTEVGLEFRPVVIVLNDSIAVTQICKSLVLFERNQNIASFYKKSGVQSDLGSYDILLK

SEQ ID NO: 43957 - protein, 85 aa, unidentified
  REGION 1..85: note = Description of Unknown:random_neg_ctrl neg_ctrl sequence
MLYRINVSPIILGKEADELRDALDIKTMKGLISRLVKDTREDYFITIYDEGFINESAIKTTNSYKQNSLVEKPPDAIACPPNFLG

SEQ ID NO: 43958 - protein, 85 aa, unidentified
  REGION 1..85: note = Description of Unknown:random_neg_ctrl neg_ctrl sequence
AAIFEESEYSSTPPIDIYLHLAVIKPSVDGSCERTGQSPQVIMVPYEIIDEKLATGFTYPSIQAFLPGGPLVEMDNPAKVASVSI

SEQ ID NO: 43959 - protein, 85 aa, unidentified
  REGION 1..85: note = Description of Unknown:random_neg_ctrl neg_ctrl sequence
HKAFKSIKCRITWKDKSPETILFGGDLKLINGTLSMLRISMEAGYLRRTVEGAYESPLMIAKWDRITKHYLPYKQSKNRIRGSKV

SEQ ID NO: 43960 - protein, 85 aa, unidentified
  REGION 1..85: note = Description of Unknown:random_neg_ctrl neg_ctrl sequence
LKNMPVQVYVMFFVIGGYERDPKTIKTNPLLPLSIGPPRAKMLGDTDIDILPKFVQRMTMSFEVLPEITSSLMPCIHDRKNKPVI

SEQ ID NO: 43961 - protein, 85 aa, unidentified
  REGION 1..85: note = Description of Unknown:random_neg_ctrl neg_ctrl sequence
LLSKKEKYVLYRLAPDLDGCDPDDTESGPADEIGYNIIGSLALITGLGDRLRYSYLVIPTMGNVYGQPITIIVMFRISNKRSTID

SEQ ID NO: 43962 - protein, 84 aa, unidentified
  REGION 1..84: note = Description of Unknown:random_neg_ctrl neg_ctrl sequence
DQVAVLRLYEYWLFRTPEKGDNNPLTRYVNITEALKITSCNATKRVAHVRKLEEGIYMASVGRISAEASEAIFLEYVLKGKSER

SEQ ID NO: 43963 - protein, 85 aa, unidentified
  REGION 1..85: note = Description of Unknown:random_neg_ctrl neg_ctrl sequence
LSLQGICTYVVKIKVKNTTVNSYNLFSELDVVVHFPKTGNKPEARWLLIGKPVTERGETLVKGKPQNGKYTANSVANLTYRVAGW

SEQ ID NO: 43964 - protein, 85 aa, unidentified
  REGION 1..85: note = Description of Unknown:random_neg_ctrl neg_ctrl sequence
KSYIEKICLAYGFSVSIKAKNGCTECFTNRQDFAIVSYKVHGQLMITDFSWWIDPSLTRHGKNLGPHINTSSQSLCCKKRYVSPE

SEQ ID NO: 43965 - protein, 85 aa, unidentified
  REGION 1..85: note = Description of Unknown:random_neg_ctrl neg_ctrl sequence
SRLAHTCEFHQMKVIFFKSIYALENDKAMLEHVTQLLGVVWGGENSIGSRSGLNEIKLKTQEKKNHGQGTTVNLKPYVVNDPKED

SEQ ID NO: 43966 - protein, 85 aa, unidentified
  REGION 1..85: note = Description of Unknown:random_neg_ctrl neg_ctrl sequence
LVVIDTITISSGARFVLYQWKVVMEAAILGDKKQSKVHDLPKDVSPWIYSKTLKATLAEGPDESNDYAVSGYFYVPRVGGPGPTE

SEQ ID NO: 43967 - protein, 85 aa, unidentified
  REGION 1..85: note = Description of Unknown:random_neg_ctrl neg_ctrl sequence
IKGKNPIALNRYQMQKIKLKVSSEISIPLRLPYGKYYPVLNHLALLDQPAKKKKDGNKSAVETIEKLQIRIQSREVQSFYTIGNT

SEQ ID NO: 43968 - protein, 85 aa, unidentified
  REGION 1..85: note = Description of Unknown:random_neg_ctrl neg_ctrl sequence
YVNNIHIIRAPDNLEILTKAKSRRKLSRHTALLSSSANDNSLLSSPNEAYNQDFPLYNPEQAHIIDPGGNLWAERELFCGRNKTQ

SEQ ID NO: 43969 - protein, 85 aa, unidentified
  REGION 1..85: note = Description of Unknown:random_neg_ctrl neg_ctrl sequence
GDIKYKGGVPLTPANLREYITRVIGNKCGTVGWSIILGRENAVIKPLRLSGAVEAQLYQGKYNIAVTVDWNILDACIADNSNNNG

SEQ ID NO: 43970 - protein, 85 aa, unidentified
  REGION 1..85: note = Description of Unknown:random_neg_ctrl neg_ctrl sequence
GMPDKFFEAPPVYNMATINNESDKLELSEYGFPKLSDRRLKAYSLLLQKNTTSWRDGHVLRYIFLKKIKHYVNLALRPLVEVKWI

SEQ ID NO: 43971 - protein, 85 aa, unidentified
  REGION 1..85: note = Description of Unknown:random_neg_ctrl neg_ctrl sequence
ETRLKMEEKNTVAKDAHKIMANCVSESMTASQGWPSAIEESPVRVIVLNVFVIKLELNVKKKVLIKSQWTEVFPEMIKILLTSKS

SEQ ID NO: 43972 - protein, 84 aa, unidentified
  REGION 1..84: note = Description of Unknown:random_neg_ctrl neg_ctrl sequence
LWFAKVKKCIPFKSGSHVYPIIRSANMVGDLSIAFSTHKENGETIVIGVLFIGFPEAELPIDIAAEEILLAESLETPNIDILIE

SEQ ID NO: 43973 - protein, 84 aa, unidentified
  REGION 1..84: note = Description of Unknown:random_neg_ctrl neg_ctrl sequence
MADAKVPAWKNSVMLYGKDFTKKSFLLSSVFSLAMQCVLRIKVLIAGIKKPKSNEVVLDGIQNEFDIYAAYGGCRSIISARVNF

SEQ ID NO: 43974 - protein, 85 aa, unidentified
  REGION 1..85: note = Description of Unknown:random_neg_ctrl neg_ctrl sequence
MNVDREFYRPIKLTILNTAIIIVYGDPKISWTDMLLVYEAKGMSLLDFLFPNVLGYFNKRKLNCLEINIKGSLQNGPVVHLQNYE

SEQ ID NO: 43975 - protein, 84 aa, unidentified
  REGION 1..84: note = Description of Unknown:random_neg_ctrl neg_ctrl sequence
SPTTKESVSLEENDRGEESDAADHVFHIIATGSNFLSIGSHDNGQKKVDPSFTANVCLVLALKLLCNGKNVQGNGVEYNSRVGL

SEQ ID NO: 43976 - protein, 84 aa, unidentified
  REGION 1..84: note = Description of Unknown:random_neg_ctrl neg_ctrl sequence
TFYEGNPLLVDVLPKGGTWAIEVAKAIEILKMMRNVPISAYMIVLMHTTQNFPTFYKKVVVGFDVGGLIKFEINAPVQLKIILP

SEQ ID NO: 43977 - protein, 85 aa, unidentified
  REGION 1..85: note = Description of Unknown:random_neg_ctrl neg_ctrl sequence
DNSHLAAKTVEMERNYSGFVDIISDAIYGYASVKRNCLLNIDMLSFTYDQKASRTGSLPPLIQELIKLYIQHGFKDHIKGFDIVR

SEQ ID NO: 43978 - protein, 85 aa, unidentified
  REGION 1..85: note = Description of Unknown:random_neg_ctrl neg_ctrl sequence
EYKQYFLNIAIDVAIELSPSALNSISPSISQIHKGLGPRGVDIIVLLLDAHAIGPQLILDIINIFVCNKCSVNIENINEMISSCA

SEQ ID NO: 43979 - protein, 85 aa, unidentified
  REGION 1..85: note = Description of Unknown:random_neg_ctrl neg_ctrl sequence
KAQVIYREKRKLLRGLLNVGGDEFKFLVTKEIKVSSEAFIVLGGLETSVLEDVFNTKYLYDTVKFSDEKKELLLLRSGLLKARAI

SEQ ID NO: 43980 - protein, 85 aa, unidentified
  REGION 1..85: note = Description of Unknown:random_neg_ctrl neg_ctrl sequence
EQLDSIFGAGKLSVIFIINDYNIIIRNERFYFFHVEQVWGRDSFAYVHILFTCMIYKFKSYEAELVKGILWKDKLGAQPAIMGGH

SEQ ID NO: 43981 - protein, 85 aa, unidentified
  REGION 1..85: note = Description of Unknown:random_neg_ctrl neg_ctrl sequence
LVTPEQKAIPPEIVMTIYFNAWLRTIAGLDRLARVLKQIKAVAIGVPDMNTIEGSMANVLGTVLSGGSAFADKEKKFHAYESCVF

SEQ ID NO: 43982 - protein, 85 aa, unidentified
  REGION 1..85: note = Description of Unknown:random_neg_ctrl neg_ctrl sequence
EKRAKKPALQNLGSDSDICAFLPGYFPEKVGTHSKTPDKSALRADKNTTSEFIKCVSQESIMPLERPGCECDERSVSDFEGATDI

SEQ ID NO: 43983 - protein, 85 aa, unidentified
  REGION 1..85: note = Description of Unknown:random_neg_ctrl neg_ctrl sequence
RDFPASGVKAKMKSSTCYIGDSNKNREIKVTNESQTPFFTYTLDFEAYACDIINRLESRIRPHTLLRNSLLAINKLRLPELIKTS

SEQ ID NO: 43984 - protein, 85 aa, unidentified
  REGION 1..85: note = Description of Unknown:random_neg_ctrl neg_ctrl sequence
ILTITFGWSTNSLKGIMIILWGLSSPSKPIMNEQDVELKLNNVAIIYVNSNLGIGEFKWPSTETVKNCLFVTQKVKVHELVTGLA

SEQ ID NO: 43985 - protein, 85 aa, unidentified
  REGION 1..85: note = Description of Unknown:random_neg_ctrl neg_ctrl sequence
YSEVIYEFKGGFKASEDMVESHFPGDLSGTMIPIQIRVNRQHAGERCKTELLKDVHSVASENDGKVPAYYVKTPLGYISKTMSTV

SEQ ID NO: 43986 - protein, 85 aa, unidentified
  REGION 1..85: note = Description of Unknown:random_neg_ctrl neg_ctrl sequence
VSLQYKLSDIRWCNDEPAPTKCEGLGVDFKYYKHIFFILVIGQAGNISKRVRKNLDVEWIITLSGRPVYYKTFQASKGTPAYVTH

SEQ ID NO: 43987 - protein, 85 aa, unidentified
  REGION 1..85: note = Description of Unknown:random_neg_ctrl neg_ctrl sequence
EKGGLVIELHIKVRDTLITELIKSKAATNTYTILAPFTKTERSYEAIINYVAEFNVNIVKVKVPIQVISKEDKTVGKDAAAELSE

SEQ ID NO: 43988 - protein, 85 aa, unidentified
  REGION 1..85: note = Description of Unknown:random_neg_ctrl neg_ctrl sequence
QTAETRTGKPAPLIAFGYRAKLIRSARILRMPTYYNSNLIEQGGILKPIYTCETMFTVDEESLYVLYVMFHLSNIIIGNLAKLNG

SEQ ID NO: 43989 - protein, 85 aa, unidentified
  REGION 1..85: note = Description of Unknown:random_neg_ctrl neg_ctrl sequence
PTEGYILSISKGEGEKEYAGPRKLSVTKQLILYVDYMPVIFLRTNFFFGPLIINNKYGYDIDYEGRAIQAYVYGLVLYCGLKSEI

SEQ ID NO: 43990 - protein, 85 aa, unidentified
  REGION 1..85: note = Description of Unknown:random_neg_ctrl neg_ctrl sequence
INIALSLLKSNLRFIHDKLAVFANKHVPANEMGVKHFSINDINTETNNKRLDSQLVKELDGTYDSLSSSILSAYTKRAKLTALEA

SEQ ID NO: 43991 - protein, 84 aa, unidentified
  REGION 1..84: note = Description of Unknown:random_neg_ctrl neg_ctrl sequence
RGVTASMLSLILENYLVLVDAKTEKGFNADKQRHEDIYLYEKPPLYDKTKEIEVNGGLAAAREDRVAVGKRWIWSAQIEPLWSD

SEQ ID NO: 43992 - protein, 85 aa, unidentified
  REGION 1..85: note = Description of Unknown:random_neg_ctrl neg_ctrl sequence
ETDLTLRAENESKTISDLAVAYDTILNPVSIELYYCLTDTLLKVVKLFKINLPGLTFKIEPQGITSIYLGVGKSDQAFEGKDSLL

SEQ ID NO: 43993 - protein, 85 aa, unidentified
  REGION 1..85: note = Description of Unknown:random_neg_ctrl neg_ctrl sequence
PLMLTAKDVSYFAEGNGQKGGLEKDCAALPVNSTVKRVLIERCITITTWRFGLARASAIKKIDIDSELKYPPGITFYNVLVNIKK

SEQ ID NO: 43994 - protein, 85 aa, unidentified
  REGION 1..85: note = Description of Unknown:random_neg_ctrl neg_ctrl sequence
AHIKVNFAGMGKINVVVRLFNQVEDGVAPKINKVGKSAYHWSLLDRRPLLTPAHYVPNSIINFFQRSLFKMNEKVNIKPWNSTYT

SEQ ID NO: 43995 - protein, 84 aa, unidentified
  REGION 1..84: note = Description of Unknown:random_neg_ctrl neg_ctrl sequence
IGGVAPGTQLQLVELLDTKVISFTAPPPAVTEYRGGALQPVNNLPFDIKTFKCIFRSAQIGIGIVIISNSSNDIVVKEMFIRGL

SEQ ID NO: 43996 - protein, 84 aa, unidentified
  REGION 1..84: note = Description of Unknown:random_neg_ctrl neg_ctrl sequence
LMGPTINMILDAAANELSLPIKHKGQFSGKKLYEIFSVDLRTMLEARTVQFKLRIANPIISRVGGKSSDKTQGCTARIEFTQIK

SEQ ID NO: 43997 - protein, 85 aa, unidentified
  REGION 1..85: note = Description of Unknown:random_neg_ctrl neg_ctrl sequence
ERSAFLSCKLQSYMIMDEGESRMVERVIAVIIDLDRAIVQTKTYLGQSLNSKPRDLKRYVTITIYENRYSVVQGASPTAGNTYFI

SEQ ID NO: 43998 - protein, 85 aa, unidentified
  REGION 1..85: note = Description of Unknown:random_neg_ctrl neg_ctrl sequence
CHLYKAWGARPDSNEQCIYGKCRLSEEDLDEPLCTQSYSPQDKQASTAFDTELSYDTNVLVLYCLGYLMNAEQMRILLNKFRRSI

SEQ ID NO: 43999 - protein, 85 aa, unidentified
  REGION 1..85: note = Description of Unknown:random_neg_ctrl neg_ctrl sequence
LYNISKLIIIKNDWKGRDKLEKVPVGGHEQVIVLLYIPKVQEEHIYYVILMIRVLCTIYKIHQADFYYSINAIWPVLNPQWLPGP

SEQ ID NO: 44000 - protein, 85 aa, unidentified
  REGION 1..85: note = Description of Unknown:random_neg_ctrl neg_ctrl sequence
GPVRIKIKTSDLEINAVYINISDRLSFTGMRLEVLSELVLFVYIQYDREIHPTEGIDLSSTRFDTWGLLRINFNSKSAELIDPQT

SEQ ID NO: 44001 - protein, 85 aa, unidentified
  REGION 1..85: note = Description of Unknown:random_neg_ctrl neg_ctrl sequence
SGAGLMIAFVIHHIEEAHSQLDCGRDLNTEKGIKERSYDCIGEVGSILTIKCTQLGKEIMLITNVFVTFPLIQTLEVYNWLYEPI

SEQ ID NO: 44002 - protein, 85 aa, unidentified
  REGION 1..85: note = Description of Unknown:random_neg_ctrl neg_ctrl sequence
DNLLAAPLAFYPITHRWDSPLYLREPKLEGNEDSTLLSFIEQALLFLYLNYASLESIHSVNVDITDDIDKCLKILAVYMLASYCM

SEQ ID NO: 44003 - protein, 85 aa, unidentified
  REGION 1..85: note = Description of Unknown:random_neg_ctrl neg_ctrl sequence
IVTTIVISIIKLNYEGILFEVYYDLPLNLKAASRLGKGFSEDSYFKFTQRTLSSTVLKEEEPGSKFSRQEKFDVIRAFSRDKLRR

SEQ ID NO: 44004 - protein, 85 aa, unidentified
  REGION 1..85: note = Description of Unknown:random_neg_ctrl neg_ctrl sequence
IHDYGWFLEAVENRLINCQMVRKIILNDVTLDPTESLLPYYEPAEPKNMLERCSYELPFDALLGNFGLIHIKQVVLKRRVRGLHQ

SEQ ID NO: 44005 - protein, 85 aa, unidentified
  REGION 1..85: note = Description of Unknown:random_neg_ctrl neg_ctrl sequence
SLIETTHAMPDRRNVAYLCSSKWRFINNPFFLASGTKHTIIRTPFIWYQDEDFAGLLEKGGISVEKTQTKQELVMETLCNHFQKE

SEQ ID NO: 44006 - protein, 85 aa, unidentified
  REGION 1..85: note = Description of Unknown:random_neg_ctrl neg_ctrl sequence
ETNNLAFLNFVADNKFVENRVKGMPGEELEVYKEVRSLWNSWVVIFLSIKREDITRMNTIYHEIGTLKLTANSELRPKLVESLMI

SEQ ID NO: 44007 - protein, 85 aa, unidentified
  REGION 1..85: note = Description of Unknown:random_neg_ctrl neg_ctrl sequence
AESILRSKTLVLGEDKVFGGYSMGLNVNLTYEAEDELGGTKDPIGTFALSRKLGDLGFKSGIMTNRAPILATAKVESEALAGLMG

SEQ ID NO: 44008 - protein, 85 aa, unidentified
  REGION 1..85: note = Description of Unknown:random_neg_ctrl neg_ctrl sequence
MAKMNERASVSMTAWVYPPDVDTPDEGSRDKSRKLSTTGEIPGKVSSIILCGPGLAKVDDNSLFKDVIEVHEPIGAGPSNLNQPN

SEQ ID NO: 44009 - protein, 85 aa, unidentified
  REGION 1..85: note = Description of Unknown:random_neg_ctrl neg_ctrl sequence
MSKNRGGYELARGRISVAFFRGYISLVSTLCADEGIETPRILKAPPIAGKESKRDFTSIERVSASDYSTVDAEKLIIVEFDLAII

SEQ ID NO: 44010 - protein, 85 aa, unidentified
  REGION 1..85: note = Description of Unknown:random_neg_ctrl neg_ctrl sequence
PVNMLPSQFHPHGTEGARRDLDRPLAREASNETHISKMRNQVNPGLPDKDLNDYDKENPGRKTIDQQMLATKHVHVSKPLLSPAS

SEQ ID NO: 44011 - protein, 85 aa, unidentified
  REGION 1..85: note = Description of Unknown:random_neg_ctrl neg_ctrl sequence
RMSLHGDLIDISLTINQERFKDDYPIYVTTSGLKLIHTERVRSTPKPSKIKVGAVILFASQYQSPGDIKLVPSVGTLTKAKGPLN

SEQ ID NO: 44012 - protein, 85 aa, unidentified
  REGION 1..85: note = Description of Unknown:random_neg_ctrl neg_ctrl sequence
LDIDKPEERAKYKSDLNLVLSNQLIADPNFVPLHLLWFLFYTSKTTIISDVISVHGLGSITLTIISGNRIIAAYSNRQTDGASKL

SEQ ID NO: 44013 - protein, 85 aa, unidentified
  REGION 1..85: note = Description of Unknown:random_neg_ctrl neg_ctrl sequence
AVLVITLIPFKASKGAKGDVNGDLRLVFIKFPYTEVGSRRTINSDECVGKGDNHVELYSGEVIAVVWAATLPYCVIFEVNMDVDG

SEQ ID NO: 44014 - protein, 85 aa, unidentified
  REGION 1..85: note = Description of Unknown:random_neg_ctrl neg_ctrl sequence
LYLFVKLKLYLSLKWPDYRQVIAKGMIMDRDENGLLKIQEEVTGYIEVERDFKDNRDAAMDKLNNASHNLRESTTQRDLGQCVSY

SEQ ID NO: 44015 - protein, 85 aa, unidentified
  REGION 1..85: note = Description of Unknown:random_neg_ctrl neg_ctrl sequence
CICFFDLHFRQPCENIAGAMHFIVFIGLSGHIDSFVKSETSCEIDAPKIAEKVSELTSEGDSEGVLEANKLYKRRAKLKVPPPKV

SEQ ID NO: 44016 - protein, 85 aa, unidentified
  REGION 1..85: note = Description of Unknown:random_neg_ctrl neg_ctrl sequence
MIFDLNGNYYQSDSVQLESYAADLHVEYTENPSELRSFNSYGPRVVYAISDHFSTDARLQKVDLPYYLCAMKIPKESPTSMMIVE

SEQ ID NO: 44017 - protein, 85 aa, unidentified
  REGION 1..85: note = Description of Unknown:random_neg_ctrl neg_ctrl sequence
QSIERDSGLIEMCHIKEYQYENILIYVRDYDVLFVYCLFFALSNKNEYLGIVPMFGELAKYRDAQFKRIILFHIVTMSKRKRLII

SEQ ID NO: 44018 - protein, 85 aa, unidentified
  REGION 1..85: note = Description of Unknown:random_neg_ctrl neg_ctrl sequence
KNINDPKSSFYNFGYFGPDIAHDSNSFLTNSSFENIENDWAYCMYHLPAKSIHSELVKIVLYTVLIKNVWTPSKPILEVSSLWLR

SEQ ID NO: 44019 - protein, 85 aa, unidentified
  REGION 1..85: note = Description of Unknown:random_neg_ctrl neg_ctrl sequence
IERSKVMNEKPFANIASGIKGKEVHDSEPIRANVVSFGFKSRVNIVLYLKSPAQLNYLNLLSLTQRDEPGHVGSTERRVNPDNLA

SEQ ID NO: 44020 - protein, 85 aa, unidentified
  REGION 1..85: note = Description of Unknown:random_neg_ctrl neg_ctrl sequence
ILVEILESFEDFNEKGPYGGIRFNRKIHAVQEPLIFREGRALLCCSILVTPNDKNEKLGTSQFKNTKADEGYEQNIIFESPYIRM

SEQ ID NO: 44021 - protein, 85 aa, unidentified
  REGION 1..85: note = Description of Unknown:random_neg_ctrl neg_ctrl sequence
TTLTLIVVKGAITVYCHDDLTSMVPRMKKEEVIKRDTTKFQRETIPELVREENIINIQPKRITTNTNMARQFANEFFYAAYENSS

SEQ ID NO: 44022 - protein, 85 aa, unidentified
  REGION 1..85: note = Description of Unknown:random_neg_ctrl neg_ctrl sequence
IDAKPRKQTNDDEDKLEYLLTNTMHWIGREMRLGGISDFKQEGVCGHVEDDVPHIVPTQETEINLWAVARWHLFLKYPRNIKVGE

SEQ ID NO: 44023 - protein, 85 aa, unidentified
  REGION 1..85: note = Description of Unknown:random_neg_ctrl neg_ctrl sequence
PSMESPEKELLFNQIDPLVFSEPIRYYSLIIAFGPDTNYGLLETYNLVVKDAGGSAEAYPVTSTTITLIVRLDTATEDIPDRPVF

SEQ ID NO: 44024 - protein, 84 aa, unidentified
  REGION 1..84: note = Description of Unknown:random_neg_ctrl neg_ctrl sequence
VRVNNFDYSFCKEAYLAKDIKAVQVPDLIIIILEIYSEDTKISGFNEIKRGKIKIPLNSADFIHTEHFKIMQESMDPIVSYPYN

SEQ ID NO: 44025 - protein, 85 aa, unidentified
  REGION 1..85: note = Description of Unknown:random_neg_ctrl neg_ctrl sequence
LVIGALLTQTSEFLNLVGVETLPEIYYAVTHTPVLRFGVPRTIFYYWNVDLVADPTKSSIINEPFLPVRDEHLECECNLRVKEFN

SEQ ID NO: 44026 - protein, 85 aa, unidentified
  REGION 1..85: note = Description of Unknown:random_neg_ctrl neg_ctrl sequence
SQKFSTRYSGGVMSFFLIVFMSIDHPFRVRIVDNRNKKYVIDDNLASNAASCEVYNNDEVKYVDELEPDYTPSIGNSTLEICIFA

SEQ ID NO: 44027 - protein, 85 aa, unidentified
  REGION 1..85: note = Description of Unknown:random_neg_ctrl neg_ctrl sequence
AWNFPAKPEPFGVISAHGYLSVRFESSGECCNIKTMVEAGTPSEDLQPFSSRAKKVELRDYRKPMAKTVKAPLSKSEGPSSIQPL

SEQ ID NO: 44028 - protein, 85 aa, unidentified
  REGION 1..85: note = Description of Unknown:random_neg_ctrl neg_ctrl sequence
PGKANTRGRVIQSSIAELASGKKDDYLAIGAVSTHKYFDESIPYYNHDDCNEHVASSSTASGEFCYYNGRTSVILYRNPGLAELT

SEQ ID NO: 44029 - protein, 85 aa, unidentified
  REGION 1..85: note = Description of Unknown:random_neg_ctrl neg_ctrl sequence
TKVYLLHYARFATKMITPKSKAIEPLALLEVADNIIGYTLQFDNLVEGHVEEPIVNSKPIEETDSIRKSLDILTRTATNAYLDIG

SEQ ID NO: 44030 - protein, 85 aa, unidentified
  REGION 1..85: note = Description of Unknown:random_neg_ctrl neg_ctrl sequence
TDILRPNKLGHGTKAKVAENKYENHFESIIEFTCDVIYSNMLGAIVVFSCKDVGERPESCVAKLAQKNWAYGGPNTIIRSQRSSV

SEQ ID NO: 44031 - protein, 85 aa, unidentified
  REGION 1..85: note = Description of Unknown:random_neg_ctrl neg_ctrl sequence
SAVSIEKDGIASHSGKIKSNIKQEVTTYLLSTKKVYQNILDLTRLAPQRPTQFSKWAVPYDSSMRLDLTDIVLILVSSAEEASSV

SEQ ID NO: 44032 - protein, 85 aa, unidentified
  REGION 1..85: note = Description of Unknown:random_neg_ctrl neg_ctrl sequence
ALKSGSIDKIRKGFKTFLSIKIKYTFAMKSMGLKTPVYTEKQDYAYAEDVPNDINADAAPSIRDNFLPVIRNPAAGDAPVYILDG

SEQ ID NO: 44033 - protein, 85 aa, unidentified
  REGION 1..85: note = Description of Unknown:random_neg_ctrl neg_ctrl sequence
REYARTNRDQSFNLCKEQVLTCMIYRGIGSIEDYNNGQENQYSFPCAKFWLINNGVVDPYADANKQGERRSFLTLYIGKGYEKLL

SEQ ID NO: 44034 - protein, 85 aa, unidentified
  REGION 1..85: note = Description of Unknown:random_neg_ctrl neg_ctrl sequence
AGPSTMPNNGQIVISEKKKAGIPPDPDYLQQGGGSDQSAAVTHDSSDEVRSVAILMKGAEAEEEIEVVVNELLYKRGLAIYLTKP

SEQ ID NO: 44035 - protein, 85 aa, unidentified
  REGION 1..85: note = Description of Unknown:random_neg_ctrl neg_ctrl sequence
YGGYESKESVYSDMCHIGFTTVSGSWRITKAPKEARETMISERKYSKRLGADTPKLQASIKQKIAKEGRIPWVETDYYPRYYEYA

SEQ ID NO: 44036 - protein, 85 aa, unidentified
  REGION 1..85: note = Description of Unknown:random_neg_ctrl neg_ctrl sequence
KKYVRTLKEEIHTVVGLVFYLLLRADRAQSSVSIPFGSRLNINNAVTTPSAKQIQLADGSESDGDPRTQMGELCYLSPIELESDV

SEQ ID NO: 44037 - protein, 85 aa, unidentified
  REGION 1..85: note = Description of Unknown:random_neg_ctrl neg_ctrl sequence
KTFILIIVSCSFDDEAEEKALLMELLILLTKFYSESYLTKVINTANPAILIFYSIFSHEETTAPKLFSLKSLEWMKLAGGIPVGA

SEQ ID NO: 44038 - protein, 85 aa, unidentified
  REGION 1..85: note = Description of Unknown:random_neg_ctrl neg_ctrl sequence
RLTENVCLRTGSANPCVGVNSIYAGIYNTLGHTAVENLVSQYTVLVSNTDGLPKEIADIFSLNDETKTNFLFLKLAVPLNALYET

SEQ ID NO: 44039 - protein, 84 aa, unidentified
  REGION 1..84: note = Description of Unknown:random_neg_ctrl neg_ctrl sequence
KTFDNNIYDKLSIMSSNAASFENELLGGWICALRYKKHAASIHGLPNDFGEKRRWELDVVPRLISAWPSHAKDQKGEVNLKKFR

SEQ ID NO: 44040 - protein, 85 aa, unidentified
  REGION 1..85: note = Description of Unknown:random_neg_ctrl neg_ctrl sequence
EIRKGSFKVIEKFFINFSILEDIIAKVILFPKSISLTGKKLQPNIQLAFLANGYKYAYPKRASNWYDKIDLVLIPTINYQVGFWT

SEQ ID NO: 44041 - protein, 84 aa, unidentified
  REGION 1..84: note = Description of Unknown:random_neg_ctrl neg_ctrl sequence
TDMHESNAKKLRGHKTPQMKNVTRNDIATNIVEYDLKIGGGPTIIYIKIFYRKVSLLPMYYLASAIYEGLYITNGLISGKKTSG

SEQ ID NO: 44042 - protein, 85 aa, unidentified
  REGION 1..85: note = Description of Unknown:random_neg_ctrl neg_ctrl sequence
NDRVGNNHLDWLAKSNKHFSRDTMMGEAKQNNRSVVITRKSSQGHLKSSGAKFLYIEYGDGHFFEHDLAPSYVDEVSLNVRKLES

SEQ ID NO: 44043 - protein, 85 aa, unidentified
  REGION 1..85: note = Description of Unknown:random_neg_ctrl neg_ctrl sequence
EDVPDGLGDSDTMLTVAVKAEKGKVYDVLFIKDGYTSMSLLLLSRVYAATKLPAWQPGGTNRVLQMEIWRAWTSVFYAIRAIKQY

SEQ ID NO: 44044 - protein, 85 aa, unidentified
  REGION 1..85: note = Description of Unknown:random_neg_ctrl neg_ctrl sequence
PRATGGYFIDKEKKRTESYIQADFPKQRPAASRKVLTLENEIQNFGVPLGAMSGRYTGRDGSYVSNPVQMECRNILYTVGENLIK

SEQ ID NO: 44045 - protein, 85 aa, unidentified
  REGION 1..85: note = Description of Unknown:random_neg_ctrl neg_ctrl sequence
MRPNPLNTRILGVWPHIDLDCIFSEPDKTQENKRSIPSIPIKVFLVIPRIYPWNSMHSQGLLPRVVFDVQTEQMSSAELYLRFGI

SEQ ID NO: 44046 - protein, 85 aa, unidentified
  REGION 1..85: note = Description of Unknown:random_neg_ctrl neg_ctrl sequence
QTKLDKRVDTSALEKICQNTYKRVNFIEREDGISTSQPKGANFFCSHCIMSVSDVLTFDIIMKVEEEARDALEDMQKSKKIFQQE

SEQ ID NO: 44047 - protein, 85 aa, unidentified
  REGION 1..85: note = Description of Unknown:random_neg_ctrl neg_ctrl sequence
KLKVMKNLASGSASWKCHVEEEAFQLPSHFRTINALVERVNIAPLILSYAQLIPMALNTSTEPGLVQPQKRIHIYIYELDAYAIN

SEQ ID NO: 44048 - protein, 85 aa, unidentified
  REGION 1..85: note = Description of Unknown:random_neg_ctrl neg_ctrl sequence
LLLSYHGMSAYRSLLAYFNDRFLIGSDDKHSQRALGLVGLIEKSQGKTRSDAEPLKVNHIFALYILEKMIEVYSKFVSYTILLGK

SEQ ID NO: 44049 - protein, 84 aa, unidentified
  REGION 1..84: note = Description of Unknown:random_neg_ctrl neg_ctrl sequence
DEFHSQKKENNRGSSPTLQDTGDLSRPYAVTWSYRTNKVAGRNSVINVASEERNLSHGVPARPQISKLSYYTSRFLKPIESISP

SEQ ID NO: 44050 - protein, 84 aa, unidentified
  REGION 1..84: note = Description of Unknown:random_neg_ctrl neg_ctrl sequence
LLSEDTAITYLLLFISMAESGPYPVIHGVGESHVGRSKQWFSLAINKSEGQCFVDGSILRMSARDQLQTMLFFAYRTYLWDVYF

SEQ ID NO: 44051 - protein, 85 aa, unidentified
  REGION 1..85: note = Description of Unknown:random_neg_ctrl neg_ctrl sequence
AGIVNSDVKTRMFKSIPKPTAEVLMGYFDKRDPTDRGAERKRYPNTETVVVIGSKLQVTEQVAFHTGPSLDQLASQLYHIPNNEN

SEQ ID NO: 44052 - protein, 85 aa, unidentified
  REGION 1..85: note = Description of Unknown:random_neg_ctrl neg_ctrl sequence
RAKQGLLDPTIVFPIAAIYRRTNDFAWNTYTSIFDKVPGLQLLIPQKVVGLTKSLLKTYGNRNGMSLLITSFKQSTVPKYEIEVL

SEQ ID NO: 44053 - protein, 85 aa, unidentified
  REGION 1..85: note = Description of Unknown:random_neg_ctrl neg_ctrl sequence
LRFHVRYYYLAVWHLARSYYIEDTTIWGFPHKELYNFKEYIRVQYVFLTESTVTIVNNFPDFGSSRFCFGSMAFEQSCDNQFPTH

SEQ ID NO: 44054 - protein, 85 aa, unidentified
  REGION 1..85: note = Description of Unknown:random_neg_ctrl neg_ctrl sequence
LERLLKMAYMIKRQYYISDAEHTLNCVASNPLLSSIEQIDSGSQELIGKDVITKINPLDGLINLTICSMCLIIISKNTIAKESEQ

SEQ ID NO: 44055 - protein, 85 aa, unidentified
  REGION 1..85: note = Description of Unknown:random_neg_ctrl neg_ctrl sequence
YKYCYKVGKRLIFISNDIYLGGNTSTYKADDTSIFAVKMIRQVEKQIIGYESRDSAYGINDINKSPQGLKGDGRGKTSFKTKKRS

SEQ ID NO: 44056 - protein, 85 aa, unidentified
  REGION 1..85: note = Description of Unknown:random_neg_ctrl neg_ctrl sequence
ADRNKLDRIYYRHKSHMFTDQKDLTGVRKIIVEKVVANEGYKGKDYADDDPDTQEINLAMPYIRELGVAQYEIANLLWAKCYQSP

SEQ ID NO: 44057 - protein, 85 aa, unidentified
  REGION 1..85: note = Description of Unknown:random_neg_ctrl neg_ctrl sequence
IHLDGNIIYEVDCCSEILFITEEANNYESSILIQRTLCSHKEDITGAGLSGLLMFKFEFHLNSGYAPMKFRAALWCLLSGVYEEG

SEQ ID NO: 44058 - protein, 85 aa, unidentified
  REGION 1..85: note = Description of Unknown:random_neg_ctrl neg_ctrl sequence
VYCSYYGGTLILVTYYKLPIVILSLTKKNLDDLQAIGTLILNKVELQKFVVSSNMKPPCGYRIFASFNEAELFPRFQLTRSQPFA

SEQ ID NO: 44059 - protein, 85 aa, unidentified
  REGION 1..85: note = Description of Unknown:random_neg_ctrl neg_ctrl sequence
LGVLKMVDHAYILWKVEQDNHPKDIKRFGVVIKARYALEQSPHFVDEEPRMDLHAGRFPFEYNTDPIQVEKIFLIVVMLLIIRKS

SEQ ID NO: 44060 - protein, 85 aa, unidentified
  REGION 1..85: note = Description of Unknown:random_neg_ctrl neg_ctrl sequence
KAGAKDGRVDRPTVHSRPFEIYLPFLDGGKTIELDIINVFNNIYLIGISQIYEPIYKYSIEFIENDLDGDPRLFEMASTEVSFAA

SEQ ID NO: 44061 - protein, 85 aa, unidentified
  REGION 1..85: note = Description of Unknown:random_neg_ctrl neg_ctrl sequence
KKLIILEALVILNIREFKGEICKAAEYATAQTSYKEISRKEAVRRFVAILKSELKIGHGGGFEFEYFNFSRDYLSQYKCWKWKED

SEQ ID NO: 44062 - protein, 85 aa, unidentified
  REGION 1..85: note = Description of Unknown:random_neg_ctrl neg_ctrl sequence
DGNERGYVTEATTLDQRNLIIKILFAVKYDRYSQMGHVLIASTKSLLNFRNASRPTMTPCHLNTTYIYVYSDAAPTGTVSDTGAH

SEQ ID NO: 44063 - protein, 85 aa, unidentified
  REGION 1..85: note = Description of Unknown:random_neg_ctrl neg_ctrl sequence
SDIFNRLQTIQTIDRMAPFSDNSGLVASQGIGTEPFWPALSRLNIKSPGFKTRSLMIGSPVKCASRNISFFKKELKASIISPNTV

SEQ ID NO: 44064 - protein, 85 aa, unidentified
  REGION 1..85: note = Description of Unknown:random_neg_ctrl neg_ctrl sequence
TPLSYGKLKAPSPSVVVSVGTRSRAHEVSLNAKSQQKRGGLSFLFNDCKNKKANSFYSITSAHKNIKPEDESSNGSESVAAEGFN

SEQ ID NO: 44065 - protein, 85 aa, unidentified
  REGION 1..85: note = Description of Unknown:random_neg_ctrl neg_ctrl sequence
ELLVAPNSEQIHFNITFDIKPEKSIQGTAAIQYDEQGLNKLECDRDLILSEFDRISAPDEKEQWKLLVSRLGSRNYFFQFDINLK

SEQ ID NO: 44066 - protein, 84 aa, unidentified
  REGION 1..84: note = Description of Unknown:random_neg_ctrl neg_ctrl sequence
YIPSYFYLVSVLKTYDSINDGHLGVSGPFEAWANVRMSRVKIINSVISLSYTTFEQTDVYVDVDTYIKNYLSSQVGHTELYAFG

SEQ ID NO: 44067 - protein, 85 aa, unidentified
  REGION 1..85: note = Description of Unknown:random_neg_ctrl neg_ctrl sequence
ISNEFVRNPEIYIYQISAVPLRRENNRIGIGDNGKLNLKVLGLQFQETTKSLSLSPHTLVNSRNLGFFKDEPQLIFSRIERGPGL

SEQ ID NO: 44068 - protein, 85 aa, unidentified
  REGION 1..85: note = Description of Unknown:random_neg_ctrl neg_ctrl sequence
VGIGKFDFKVCRRDGNIDFITWTSSSVCGYQSTNAAGFTTIEFKNFSSYYHDAFSCIYHAIPPELDLPEHVERREKLIVLLHMKY

SEQ ID NO: 44069 - protein, 85 aa, unidentified
  REGION 1..85: note = Description of Unknown:random_neg_ctrl neg_ctrl sequence
AKLPFYSSVIMNMVVATERETESEQFSADPRICILMARKDVAEIIVDSHKLSILVVFIESGAALNLVMEMYKAKCKQTKCEILTI

SEQ ID NO: 44070 - protein, 85 aa, unidentified
  REGION 1..85: note = Description of Unknown:random_neg_ctrl neg_ctrl sequence
VTLLNTTMERANRALGDIKRDMLGEPKKGNLIPVSARDLLKFQGFLQDISDELNNTEMFKMIIQPGIYVESRVMTIQPDIIEYWV

SEQ ID NO: 44071 - protein, 85 aa, unidentified
  REGION 1..85: note = Description of Unknown:random_neg_ctrl neg_ctrl sequence
QEAQISLSSVAISLSIDCRKQIHLEEVHLKRLCSKKLKSGLTSGEYFDGRKSDYTGFLQHQVNLKLDINTTKEECVQRITRIRYL

SEQ ID NO: 44072 - protein, 85 aa, unidentified
  REGION 1..85: note = Description of Unknown:random_neg_ctrl neg_ctrl sequence
VHLKIQAFNIILIIKLKLNDGNLEKEAVEKVIFFVVSLELNTFQSIKINSVVFPVSQTEMKSILNYFVRGKMNKKDEEEYITSDS

SEQ ID NO: 44073 - protein, 84 aa, unidentified
  REGION 1..84: note = Description of Unknown:random_neg_ctrl neg_ctrl sequence
GVYTFDANYSRAFACSARLPIYSELLAGIEPGPSVKCGSAFDNVNGIIYEQAGVITMVAYKWEMKLTLYPSEELEGCLRPWTGD

SEQ ID NO: 44074 - protein, 85 aa, unidentified
  REGION 1..85: note = Description of Unknown:random_neg_ctrl neg_ctrl sequence
AGSAGVSNVNFIKMNAGAGVSCKYGVGVYNQLQALILKRIWNLAALYRGMSQVAQNNTPTNEEVIPIMSYMGGSSETRSGDLKRA

SEQ ID NO: 44075 - protein, 85 aa, unidentified
  REGION 1..85: note = Description of Unknown:random_neg_ctrl neg_ctrl sequence
SALNPPVHRDNVPTEDANAERANMGKQATKVLGPIGVFKIAETRKYNPIVKPRIERGEIRTCKNVTLEEVKGEWMNVTERFTIYQ

SEQ ID NO: 44076 - protein, 85 aa, unidentified
  REGION 1..85: note = Description of Unknown:random_neg_ctrl neg_ctrl sequence
YLTNFNVIHIEKYGGRKACAEIVDRVMTMKEKRTYLVSEAVREELMLRMWVPLKQNEDAKKTTSLSLEKGLTQVMICKVIESRYP

SEQ ID NO: 44077 - protein, 85 aa, unidentified
  REGION 1..85: note = Description of Unknown:random_neg_ctrl neg_ctrl sequence
GYEAEHNNAESNNGALIWNLSQADTNIDVEKWVDFGHVSEAGFGRFDMIKCDLAFTQEYHVAVLAANGSKVKKYNPFLRTAKSFV

SEQ ID NO: 44078 - protein, 85 aa, unidentified
  REGION 1..85: note = Description of Unknown:random_neg_ctrl neg_ctrl sequence
FAKSVKNLVYAVFKMVNSFAPAITTQTKLKGLEPSHKEKMSFKELYTIIVKRTIPVPASAVDSEMSGVYRYILKVTKAVSHLYWD

SEQ ID NO: 44079 - protein, 85 aa, unidentified
  REGION 1..85: note = Description of Unknown:random_neg_ctrl neg_ctrl sequence
PKYVINNIACLIDAQPAESTNNINRRYIKVLTVILIAITYNILLGVSCESALRFIQRCPSLPTHWTRFEYVISAESIKVDENDKA

SEQ ID NO: 44080 - protein, 85 aa, unidentified
  REGION 1..85: note = Description of Unknown:random_neg_ctrl neg_ctrl sequence
REAILFLEKTGTPTFVSIHGIYGDASNITDVYYQVSKENLTLSMKKVHEVLKAEIPGFAQANEGERLFKAILRKIRSYFTECLPE

SEQ ID NO: 44081 - protein, 85 aa, unidentified
  REGION 1..85: note = Description of Unknown:random_neg_ctrl neg_ctrl sequence
EAEAIMRVSGIHTLVMDVKRFTVDMISDAQRVNKLKNIDKYDFIWVNYYDRQPFITRNYSPPDQGIVDIADEVCFYFTLLTVGPF

SEQ ID NO: 44082 - protein, 85 aa, unidentified
  REGION 1..85: note = Description of Unknown:random_neg_ctrl neg_ctrl sequence
YVADNNLQVFYTLREPPRFGSSYEVNCQSEITVAANQLTQNEALAIAAVMDSSKYTPEQIDVEHLSNNIVKGIGKDPIGSEKRRK

SEQ ID NO: 44083 - protein, 85 aa, unidentified
  REGION 1..85: note = Description of Unknown:random_neg_ctrl neg_ctrl sequence
YPEPEGLYAGGFGGLLERTPIIWAQIFVKYTTKCGNKSFLVMPLYGSTPLWVRKMGQLLLDEKAIWATRVALVTPETCEQGKYFE

SEQ ID NO: 44084 - protein, 85 aa, unidentified
  REGION 1..85: note = Description of Unknown:random_neg_ctrl neg_ctrl sequence
MFLTGEAPIKGHVLCGRDIPASAKSIEEHYAFRQDHIERYRATEASSSVYFVKQSIVRNVIRTSNVIMVCTTKVRDFLDIMIVHV

SEQ ID NO: 44085 - protein, 85 aa, unidentified
  REGION 1..85: note = Description of Unknown:random_neg_ctrl neg_ctrl sequence
NFKGAVKDPDNSSIKFNKPPMKFLDVSTYIFMSNAQLEDQLKVYSNATRNRAEIKITLSNPEKTKFIGDIGISPTIRAPEIGLKG

SEQ ID NO: 44086 - protein, 85 aa, unidentified
  REGION 1..85: note = Description of Unknown:random_neg_ctrl neg_ctrl sequence
KQQGECYKGCVLQAMVHEETNGAVLYLFMQKSLNAVSLISLSQRNRNAHYYGLYVYNFSWAYKGWPYIETNFRICERINDYRAGE

SEQ ID NO: 44087 - protein, 85 aa, unidentified
  REGION 1..85: note = Description of Unknown:random_neg_ctrl neg_ctrl sequence
GSGGYMFIEGVDNVRNVRVLLVFQGDEETVTYVSLNELNLNTAATLVFDILLFRRTIPSMLFSELVRTLNASKPKASGHTSELSI

SEQ ID NO: 44088 - protein, 85 aa, unidentified
  REGION 1..85: note = Description of Unknown:random_neg_ctrl neg_ctrl sequence
SIIDLFFTDVYAYDVEKPKAPYGNVNISIEFSKTAYNLHQAYLAPFLQSYALPYFPTLYCGHLNSPVWNTLFAAYYLGGQQDVVP

SEQ ID NO: 44089 - protein, 85 aa, unidentified
  REGION 1..85: note = Description of Unknown:random_neg_ctrl neg_ctrl sequence
RTQLEFPNVRFNIYGEMHKVKFYTLHGKVEKSVKQLKLGILIPSDFTRFIGDNKDAYNVTFLFVLVIILRGEAVQRAIRPLDLST

SEQ ID NO: 44090 - protein, 85 aa, unidentified
  REGION 1..85: note = Description of Unknown:random_neg_ctrl neg_ctrl sequence
EFFRGELDVRNVPHSYIRLTYEFVNPISKLRELFNLLDTKWKGESSFIVYQTFMNNITDLRGAVCLYRVERVSIKLPFDQDKIIN

SEQ ID NO: 44091 - protein, 85 aa, unidentified
  REGION 1..85: note = Description of Unknown:random_neg_ctrl neg_ctrl sequence
KNQTINEIKLTRENYRIVVICRCLQEASKIERPKIRWVFSANCVKLTRAFSVTLYLPPLKIYKNSILGLYLKGPLESEYDSACIR

SEQ ID NO: 44092 - protein, 85 aa, unidentified
  REGION 1..85: note = Description of Unknown:random_neg_ctrl neg_ctrl sequence
LVILFIIDPRNTDVFLQGIRAEDELKVDMGVTINILRDNIESHLIVLFIKMENKGPPEPQNKLEYSSVSQMLITDELRITSCPLT

SEQ ID NO: 44093 - protein, 85 aa, unidentified
  REGION 1..85: note = Description of Unknown:random_neg_ctrl neg_ctrl sequence
LQERIVKLFNLTLNHTRMNRLELAMTGTENDPLRSLLASEDVADLLPEIRGNDSFAVGSARVGLKVNIANVYVSFDLPLDEIGMN

SEQ ID NO: 44094 - protein, 84 aa, unidentified
  REGION 1..84: note = Description of Unknown:random_neg_ctrl neg_ctrl sequence
SDLGDKLGAILIHIENAASTSLGTVGCRYVKGDKFKKLPKLVDQDTTLIRSILNNGLESNNPTVLSSSKFGCLFHFTELIVLFP

SEQ ID NO: 44095 - protein, 85 aa, unidentified
  REGION 1..85: note = Description of Unknown:random_neg_ctrl neg_ctrl sequence
LFGLELLAIHDPKDPSVIVSNGKTQEGAGLDLKAIIKGNEREYILTSIEPRSYFNGSRWVSNLLYFYAVRIPKYMKITYVIWKLV

SEQ ID NO: 44096 - protein, 85 aa, unidentified
  REGION 1..85: note = Description of Unknown:random_neg_ctrl neg_ctrl sequence
GVDYIILLKKITSFLLSFENKELRFLGAAGCYQKSYKQDAITDIEGVMVIPMNIVLYPSWEVEKAVQHWVKDGTKAGGGPCRGDN

SEQ ID NO: 44097 - protein, 85 aa, unidentified
  REGION 1..85: note = Description of Unknown:random_neg_ctrl neg_ctrl sequence
FEVPRLTPKRKKKSIILRIVKELGCLGKKKQEDDQVVISSCLRDGLTLIKDIYGGPANSAKDMQKEYVITSIIQHRNLYYSLDTS

SEQ ID NO: 44098 - protein, 84 aa, unidentified
  REGION 1..84: note = Description of Unknown:random_neg_ctrl neg_ctrl sequence
PKKHKREVGMKEERRMTVEYTSFPLNKTIYVESDNAGKTSQELFEFEKIIETIIVFDVVDRTAGVRLIPISIVPIYFEHQDQLG

SEQ ID NO: 44099 - protein, 85 aa, unidentified
  REGION 1..85: note = Description of Unknown:random_neg_ctrl neg_ctrl sequence
DNPYVMSLLGSASEGMVPYIPSDQTLASKNFCSACAYIRHTVGKYALSRKPSYFRIIVANVVKYKSIPTSTKGTKVSVGFILPIL

SEQ ID NO: 44100 - protein, 85 aa, unidentified
  REGION 1..85: note = Description of Unknown:random_neg_ctrl neg_ctrl sequence
YASLLWSSRVPRPPAVLIEKGLKKTNKVYTKGPNINILWSTKVLKTAYMLWPDNHTNKMGFEILVSLGQSYLSDFHALNCISTSG

SEQ ID NO: 44101 - protein, 85 aa, unidentified
  REGION 1..85: note = Description of Unknown:random_neg_ctrl neg_ctrl sequence
LHVTIVQIYGELEQTFINGKIWEIIRVHPVIDDIYYWLLNVCAKIDALFVICTKLSNDTDVQNSLAKKVWALKVDKHFNMTMRGW

SEQ ID NO: 44102 - protein, 85 aa, unidentified
  REGION 1..85: note = Description of Unknown:random_neg_ctrl neg_ctrl sequence
GGAIALVVSYAYREVILQYVIFLLLNLNANAPDRPEEGVESFDDKYAFYLDIWIRHVRDLNICGTRGHTLSNKVIYTKPIKIKLQ

SEQ ID NO: 44103 - protein, 85 aa, unidentified
  REGION 1..85: note = Description of Unknown:random_neg_ctrl neg_ctrl sequence
KIFVRKQYWKLYGPAILCIQNKIVIALSGRNPGGPSTIFDNDQSCATNHCKFCECATGEVTLANYVIKFELLNTKKPFGDSGANV

SEQ ID NO: 44104 - protein, 85 aa, unidentified
  REGION 1..85: note = Description of Unknown:random_neg_ctrl neg_ctrl sequence
IFAIIREEDEARKLESLLEGRLIAYPLIHVPVQIHMKGTTNPKALAYGLGQTEGIFQIQPQLHEIKCATGHFGCVSLEAELSSKG

SEQ ID NO: 44105 - protein, 85 aa, unidentified
  REGION 1..85: note = Description of Unknown:random_neg_ctrl neg_ctrl sequence
GTNSGPIIYDRKSFAYDKLKGAPTIVIFMDSHMGNYYILFVKAQIIECREQKMMKATTGLKIEASTQMAGELVKSANLTHLMSPL

SEQ ID NO: 44106 - protein, 85 aa, unidentified
  REGION 1..85: note = Description of Unknown:random_neg_ctrl neg_ctrl sequence
WDISTISTKIVVKHFALRVSVWNDHLEELASLVAMEPARASKLKYPTIFAVNIKLITNIMQKVSTKPSRREGKVGRILPEDEELN

SEQ ID NO: 44107 - protein, 85 aa, unidentified
  REGION 1..85: note = Description of Unknown:random_neg_ctrl neg_ctrl sequence
ITSVRVPLMDNGMTKDAASYAVAPARFLANYIVKVAMILLDGVATYTQFLTCYGFLRVLRYEVNDDVGSFLSGGLKVRIFYESRY

SEQ ID NO: 44108 - protein, 84 aa, unidentified
  REGION 1..84: note = Description of Unknown:random_neg_ctrl neg_ctrl sequence
SMNLDLTQIYCPEDKDGKLTEYVWIRKLTSGLKTPPKRNFQDSTEPYSYVPGIEGFVMRSPEAFLARGSYLLVRRTVMGYAAIT

SEQ ID NO: 44109 - protein, 85 aa, unidentified
  REGION 1..85: note = Description of Unknown:random_neg_ctrl neg_ctrl sequence
GYDVGQFAAGFQGKDSLTVFYYPDKEAKLLFVKKESLRAKIIKRLIVAAYGKNSEQEDVLLLETSKHCWTTNELMWTSKPYLSLD

SEQ ID NO: 44110 - protein, 85 aa, unidentified
  REGION 1..85: note = Description of Unknown:random_neg_ctrl neg_ctrl sequence
YDYIAYLQGNDETKPGSKDERGQSKQSSTPTPIAMKIATEGLLTGKIKDANNGESTYKRMDQSFWLPFRSSKICNNTCLTFLLGD

SEQ ID NO: 44111 - protein, 84 aa, unidentified
  REGION 1..84: note = Description of Unknown:random_neg_ctrl neg_ctrl sequence
HEYKVTTYSWPLNYKKYIAHFGQIPSVNMGFKEDTSGCRNNFTQAFKPIILDTSGKGCSANLFVADYIMNAGGGIDEKLSHIEI

SEQ ID NO: 44112 - protein, 85 aa, unidentified
  REGION 1..85: note = Description of Unknown:random_neg_ctrl neg_ctrl sequence
RPFLAAISGWRSDLFGVTASVATYDDSKIHEYIIPLKYKVLSRSRAFLPQGKIVPSFLMTFDEIDERAPLTLNVYDAELVPDPYA

SEQ ID NO: 44113 - protein, 84 aa, unidentified
  REGION 1..84: note = Description of Unknown:random_neg_ctrl neg_ctrl sequence
LAVNSKMLMFCVKLTGVKPDNYEMEIITYFSIMNGNLINKTAKPLGWTTIDRGLFSATKEPPAKIGLKFAKMELRSGNDAIEAM

SEQ ID NO: 44114 - protein, 85 aa, unidentified
  REGION 1..85: note = Description of Unknown:random_neg_ctrl neg_ctrl sequence
TIRKIYKSSPQGDDVASYGIEPCMKASKAEIHNKTDIGFYYIEYFNGFNNFSEINLNEIIIKALKYSVCAEKTNKSKNKAMNRVF

SEQ ID NO: 44115 - protein, 85 aa, unidentified
  REGION 1..85: note = Description of Unknown:random_neg_ctrl neg_ctrl sequence
RKMFILVKASQLVTKVKQVKVVDSDILERKVAAYELQVVCSVQPNSPSTICCGFLDDDAILVNSLSEAAIKLDAHIGMGLIFYKL

SEQ ID NO: 44116 - protein, 85 aa, unidentified
  REGION 1..85: note = Description of Unknown:random_neg_ctrl neg_ctrl sequence
ASKLKFHKWFSPDPEKIKLDHNVVGRENVEPFENYEAHSLNALNLRDNAGKLDIPPGSVKGSMTDKESFESGDLVKNVGTLNKNV

SEQ ID NO: 44117 - protein, 85 aa, unidentified
  REGION 1..85: note = Description of Unknown:random_neg_ctrl neg_ctrl sequence
PDALSGYLRKKRIDEIEATDKFVDMNYLGVSLWYAWPQDASLQNQKKVQLVDLIISLQRFTQGTVQIKAQKVNIFGKLEYGFEAP

SEQ ID NO: 44118 - protein, 85 aa, unidentified
  REGION 1..85: note = Description of Unknown:random_neg_ctrl neg_ctrl sequence
SVERNTIIVVNSQPVELVKVASFDDEDTIDLGLTWTQKKGTFAKALRIPYLIVDGIGADHEDGAHLLIPTSVNAYKAKNTPAHIP

SEQ ID NO: 44119 - protein, 84 aa, unidentified
  REGION 1..84: note = Description of Unknown:random_neg_ctrl neg_ctrl sequence
YDEMNFKDLAIMLDAIASNEQALKEELSGVYTFLENAIRCGLVLIPAAAYRDQLYETLYLASGEIVAYSKYDIGRRYLHFASSM

SEQ ID NO: 44120 - protein, 85 aa, unidentified
  REGION 1..85: note = Description of Unknown:random_neg_ctrl neg_ctrl sequence
GDVVEVVLSIVNLVYTKLVTCEKIELTLYALGRAVLLVNVCVVGFEASLKKISQVSKEFINEVLVGPEENADVVIAAKLINDERV

SEQ ID NO: 44121 - protein, 85 aa, unidentified
  REGION 1..85: note = Description of Unknown:random_neg_ctrl neg_ctrl sequence
LPRLFLFYRAKYQFVQHYTVNNLMGEEEISETSSFNDDSIEGRVPLPTLEFTNDNEIKKKEGCEDSKKILNSDPNSINYHVNPIV

SEQ ID NO: 44122 - protein, 85 aa, unidentified
  REGION 1..85: note = Description of Unknown:random_neg_ctrl neg_ctrl sequence
TALKIFRSKWLSKQGGDILIAEAENIFKHIKWIGPAVGIVGKLGTKLIPGFWVQGLKLRLQDTESVIKESGGYSKIAPTLPIVDM

SEQ ID NO: 44123 - protein, 85 aa, unidentified
  REGION 1..85: note = Description of Unknown:random_neg_ctrl neg_ctrl sequence
LLNIPMATEHKREVLGLSFFHGKLLAVCVSPFPIIYLINWDKILLIQYFILSEYVGSSQNSYAIAGKSVEVQVFPPSKMCHSKFA

SEQ ID NO: 44124 - protein, 85 aa, unidentified
  REGION 1..85: note = Description of Unknown:random_neg_ctrl neg_ctrl sequence
CMDWPVSKMCSSMAFIIKIGNARYTLSNYRNPLFTPGSNKGPYLSAVLVQIANKLPTEIFKEYGGKVRLVEEQYMYSQYMSLSFM

SEQ ID NO: 44125 - protein, 85 aa, unidentified
  REGION 1..85: note = Description of Unknown:random_neg_ctrl neg_ctrl sequence
KEDRMSNKTTKNITPGVFKEGTKDQVECGCDAEDRESHYYDGCTTNVNSDDYVPKINKEFLVLTWINVKQLALEIVFLWKTKPVV

SEQ ID NO: 44126 - protein, 85 aa, unidentified
  REGION 1..85: note = Description of Unknown:random_neg_ctrl neg_ctrl sequence
SLQVYSEPPVSPIVYKTFERGGFRIGPVTRKDNRVDHYPVSIMWKLIVKFTEFDPSKPFLRLVYTKAWLGQSPGKNKRMQIKHER

SEQ ID NO: 44127 - protein, 85 aa, unidentified
  REGION 1..85: note = Description of Unknown:random_neg_ctrl neg_ctrl sequence
FRCPKSKKDIIPLGYNVELLPQLGYVVMEEERRGWNEKELRCKTKGIYAAWLKSLYTYYKRTDSDKKIPEDLIIRYSLIEADIEY

SEQ ID NO: 44128 - protein, 85 aa, unidentified
  REGION 1..85: note = Description of Unknown:random_neg_ctrl neg_ctrl sequence
HPCWIPVYGNEFLTIISLLKIIRDLRLRHLRIKPKTGDIVPRTFNVVGKTVIALATAQVEDLLPVDIKFVGLDEFYSVPYGAWYP

SEQ ID NO: 44129 - protein, 85 aa, unidentified
  REGION 1..85: note = Description of Unknown:random_neg_ctrl neg_ctrl sequence
LPDFTDVDSPGSFNNKAKGVLVLIGHINAIYVDGMDQALFRCNPKLQAQKLFATLLLRALAVQLVSGHGECSSGSFLTADKKMKP

SEQ ID NO: 44130 - protein, 85 aa, unidentified
  REGION 1..85: note = Description of Unknown:random_neg_ctrl neg_ctrl sequence
ALSHNKATVDQQEEKCRVKQAKNRAPPKNNFNLDRLDIHLQKLWTRIVDLITAVSFLLEIIRGENMSSILMLVPNGNCSNLPPIL

SEQ ID NO: 44131 - protein, 85 aa, unidentified
  REGION 1..85: note = Description of Unknown:random_neg_ctrl neg_ctrl sequence
KVPRNLNKKPLFTWKSADNCEYYDARKEKIGDFNDVGKSPTTDDKQMSGVVEGLKNGLIIRGNIRYGVINVVAGTMLPLKGTPKI

SEQ ID NO: 44132 - protein, 85 aa, unidentified
  REGION 1..85: note = Description of Unknown:random_neg_ctrl neg_ctrl sequence
KVAKLREEHIPKDIYSDRFIYINKEIYTMAVDIRADYHLSSIFYKVPPCGKVSELDPDTANSETANSASIIGRSIVDYPVTKIHA

SEQ ID NO: 44133 - protein, 84 aa, unidentified
  REGION 1..84: note = Description of Unknown:random_neg_ctrl neg_ctrl sequence
LKKTTGNTIEYRLTYHLYLVLVEKVFRGIDALKAQAGKLWLLADDDQGGEAIFISEVADAKVIKKKDNQLTPGLSSSMHQIPRL

SEQ ID NO: 44134 - protein, 84 aa, unidentified
  REGION 1..84: note = Description of Unknown:random_neg_ctrl neg_ctrl sequence
FFVRDNVDKLILPGPEIQSLYGMSTLPLEVDALQYLLNIATGKVSLEWFPEEKEDEAEGIVKVMVVMGAFDFFLFIEDADRLIV

SEQ ID NO: 44135 - protein, 85 aa, unidentified
  REGION 1..85: note = Description of Unknown:random_neg_ctrl neg_ctrl sequence
TSDHPISVKALHPETLLNKRVSEAKLASIITPSVPMEQTYEKLTLDEYTLLESNSEFIGIGTNGLYLLSCMNFEVASLDEHVIKS

SEQ ID NO: 44136 - protein, 85 aa, unidentified
  REGION 1..85: note = Description of Unknown:random_neg_ctrl neg_ctrl sequence
LRVLVREYTFTIPPQGIYPEHKQDFSGFVITYEAIIAIYPKTESSIAALKKETHFGISGNANRELFHVEGFITNRSAIKVSSLCV

SEQ ID NO: 44137 - protein, 85 aa, unidentified
  REGION 1..85: note = Description of Unknown:random_neg_ctrl neg_ctrl sequence
VKLDHLLSVNEKAKKSSFFDVRENPTEWVKSLIDNEGYGEMRNNSECRVMSTINISTANDDTLQFADTFGSRNYCNVVKTDRYTD

SEQ ID NO: 44138 - protein, 84 aa, unidentified
  REGION 1..84: note = Description of Unknown:random_neg_ctrl neg_ctrl sequence
GVDRKVDERQGYEYIIKKILLNSSYKKKILKARFGGDVPANFSWTLDGPDKLFKHSVERPYCTMPEQIEYFFCDYAPSRTEFVG

SEQ ID NO: 44139 - protein, 84 aa, unidentified
  REGION 1..84: note = Description of Unknown:random_neg_ctrl neg_ctrl sequence
GYHPEEKNIDDNAHDKEIFVIYKRDPIDQSYMPFDSDAVVKNMILGGCETYLLGAGERQKRSVQWEKRMEYGFESSYFFEGMIY

SEQ ID NO: 44140 - protein, 85 aa, unidentified
  REGION 1..85: note = Description of Unknown:random_neg_ctrl neg_ctrl sequence
FAIDMNSFFFQLGYYLLGEALGGEQQNAVPGLRGWYFEIEHNRSLLEIRRKCECARPEGYVDYVFEIKPYEERYIISKLYRPNKV

SEQ ID NO: 44141 - protein, 85 aa, unidentified
  REGION 1..85: note = Description of Unknown:random_neg_ctrl neg_ctrl sequence
NEVTIAYITLFHVVEPILPGSDLPLTGYYEYESKAVVIGTRYIKLTGEIAPNSVTFVEGMEEFGYNWTYIAWPLERSELKSPRNR

SEQ ID NO: 44142 - protein, 85 aa, unidentified
  REGION 1..85: note = Description of Unknown:random_neg_ctrl neg_ctrl sequence
QIMYLALQNSANEASLADQAFKGIELNPASYAGFERDGRDYRTVNSDPSSLEVVGGSYDNGLAQPLKKTDAKGISMSWKGHLIDF

SEQ ID NO: 44143 - protein, 85 aa, unidentified
  REGION 1..85: note = Description of Unknown:random_neg_ctrl neg_ctrl sequence
KGLIDASSIIRLVSMFTAISKTVFIGLTAKGGKAGLGSMSFNEDKQKRANNVINHAEDKGELCLGEQLRFEYIKNRLWMTIKNFC

SEQ ID NO: 44144 - protein, 84 aa, unidentified
  REGION 1..84: note = Description of Unknown:random_neg_ctrl neg_ctrl sequence
IAVDADFTRVIHIVNLDGEIVMLLLSCGYGMMNPVNHYIKEEFTLINSNLTTDERIQGHSNRIDLCFQLLTIPANELQISLLVY

SEQ ID NO: 44145 - protein, 85 aa, unidentified
  REGION 1..85: note = Description of Unknown:random_neg_ctrl neg_ctrl sequence
EVAQQYKSSLQKSPRLEFKYFKMVISNYNNIIPLWLCPLKVIQVFRLLLSPVFFTYNTIKYARISESSTYLLAEDRWAFLVRWSQ

SEQ ID NO: 44146 - protein, 85 aa, unidentified
  REGION 1..85: note = Description of Unknown:random_neg_ctrl neg_ctrl sequence
GEIEPAVPKFKGKTYKTKVKTIGKNAGSMVTADYKIQIQADPPLKSTVDYNRNGILEEIDAIASNNFYPMLLDGDKHRTLEWTQF

SEQ ID NO: 44147 - protein, 85 aa, unidentified
  REGION 1..85: note = Description of Unknown:random_neg_ctrl neg_ctrl sequence
LDNMALFYVLNPATMSLFLLDVARPAFYVPARSIQPDVHDMHQGANNRRESTSITVHFLFTGLSVKDNSFDSKTFRGVEEFTLPI

SEQ ID NO: 44148 - protein, 85 aa, unidentified
  REGION 1..85: note = Description of Unknown:random_neg_ctrl neg_ctrl sequence
NTVLYAKGKKVIVSFKEDPVQALEKFAQNILDQVLGLFGVPIISYLIVNESNIIGYRIRVTTGLFMHPSGYELLVMTPIRDIKPG

SEQ ID NO: 44149 - protein, 85 aa, unidentified
  REGION 1..85: note = Description of Unknown:random_neg_ctrl neg_ctrl sequence
AKSKSNIVNILGLSVEPQSNLEYKFDVKPYYASKFSLLKNYSLELAAIVFISDLHNEPSDSWSGGATLAKMVLNNMYVLVIARHN

SEQ ID NO: 44150 - protein, 85 aa, unidentified
  REGION 1..85: note = Description of Unknown:random_neg_ctrl neg_ctrl sequence
RMSEEKLQILSASDIPTHKQTGSNGGTIVDPLGDMGFEFNQKFAKFTKADIFPTTKKAPLSVPLCGPNMIIIGISLELKVCGEDT

SEQ ID NO: 44151 - protein, 85 aa, unidentified
  REGION 1..85: note = Description of Unknown:random_neg_ctrl neg_ctrl sequence
GAIDKFKACLNHPTRGNCEPISLKSYHLNMNSSRSEVRKPKSSECIIESDTLGLKRILAKYFLVFLLWKIYKEYEVNKKVSRCRI

SEQ ID NO: 44152 - protein, 84 aa, unidentified
  REGION 1..84: note = Description of Unknown:random_neg_ctrl neg_ctrl sequence
QSVLFMSDALMKLTSSYATSIDQWDIASNGLYYEKLNPIVSIYLIQPPRALSFRRTAITDECGKYTEYTLIKFYTSARKNVSAA

SEQ ID NO: 44153 - protein, 85 aa, unidentified
  REGION 1..85: note = Description of Unknown:random_neg_ctrl neg_ctrl sequence
GKMIIFAIKLSDSNETTIHRTYGGYEPIIPKCEGFGKYSGNGNMQSDYYLPDIEPSEGVEIGQKKPDERNVTYVTDILDKISFDD

SEQ ID NO: 44154 - protein, 85 aa, unidentified
  REGION 1..85: note = Description of Unknown:random_neg_ctrl neg_ctrl sequence
VPVFYAGLTSDLYHHFLYFVADKPVRLELEYSRAIVLNGSVYHELIRRRTADSDEFGLMPIANNKIKKRSAAETKGSNENFNQDM

SEQ ID NO: 44155 - protein, 85 aa, unidentified
  REGION 1..85: note = Description of Unknown:random_neg_ctrl neg_ctrl sequence
GKWFVRLSNIKLKGTNPEPKVCFVVLILQNLSVSGEPVARNKEGFPNNSSIKIEHLYVPTFRTLEAINDKAWYKDWIKVQNNYAI

SEQ ID NO: 44156 - protein, 85 aa, unidentified
  REGION 1..85: note = Description of Unknown:random_neg_ctrl neg_ctrl sequence
NTLTSVNINHDGIVTASIGINIIIFHDANSNCSVFAVQTFANISIPQPKSKPQKGIVKVFNTEDVNSCVDSAIMKHFVVGFEAAI

SEQ ID NO: 44157 - protein, 85 aa, unidentified
  REGION 1..85: note = Description of Unknown:random_neg_ctrl neg_ctrl sequence
HSKAKDSQYRALIDTTGYTAIEKEDITLTVFHYVMLNASIFLNCLICLCTLLKTMKFQIIISSLAVPKNVQKGNNPLDNTQLEAI

SEQ ID NO: 44158 - protein, 85 aa, unidentified
  REGION 1..85: note = Description of Unknown:random_neg_ctrl neg_ctrl sequence
LIGVEFIPAVPLGVGHIKDSSAGANLYYPFVIDVRLVQNDKDNDGNGMSDFYSCWESLMTGYYTVKYREGGNARGLADKSFNSEL

SEQ ID NO: 44159 - protein, 84 aa, unidentified
  REGION 1..84: note = Description of Unknown:random_neg_ctrl neg_ctrl sequence
ISIELDTTEYWDGLWVSMILNGFELIVLLVPTTDFVDLKFAIRDEDKDKFDGYAARSSFFTYGLLGVWDAKFENTYSEENSNFK

SEQ ID NO: 44160 - protein, 85 aa, unidentified
  REGION 1..85: note = Description of Unknown:random_neg_ctrl neg_ctrl sequence
SYFSQKFNEFSLIISANKENLINLGFAINLYDPETETYDKVRSYWVVALILKSAGIIAPGLKYAINTLHYSEQESETYKDDNRPS

SEQ ID NO: 44161 - protein, 84 aa, unidentified
  REGION 1..84: note = Description of Unknown:random_neg_ctrl neg_ctrl sequence
GYKFVEVKVATILYTARLLIALRGIAQESCHITQYYGGVLNPLHSDQNGSKVCATMEEMVDYYTSSIGVAVADSFRSITPQGNI

SEQ ID NO: 44162 - protein, 85 aa, unidentified
  REGION 1..85: note = Description of Unknown:random_neg_ctrl neg_ctrl sequence
LNIADNGVPGNGSRRINEQRFLFMSLNQIVENEKNLVAKESLGIETVEIGNPYQEAAVPQKKNVREGARERISLVNYIDIPLETG

SEQ ID NO: 44163 - protein, 85 aa, unidentified
  REGION 1..85: note = Description of Unknown:random_neg_ctrl neg_ctrl sequence
YAKKRLQGSALAYSLSHIILKIDWDVLQGIENQGMLEIGEPERHNGVNQRDLFKYFFTLYESEKVVALIGLGHENAKYTLVGIAS

SEQ ID NO: 44164 - protein, 85 aa, unidentified
  REGION 1..85: note = Description of Unknown:random_neg_ctrl neg_ctrl sequence
EDFKPVRGLYELLENILYEGCLTAQPLREPGVLKRVSKGTKLLEYPYLYKITVLEESALGAFDNITMLENYSLLMVYYGRPEVLR

SEQ ID NO: 44165 - protein, 85 aa, unidentified
  REGION 1..85: note = Description of Unknown:random_neg_ctrl neg_ctrl sequence
GEEHINYENTSALTYAYLDGLYTNKAKLWGRTSSGKLRKQIYAGYALDYKRLERYDRYNGVGIISNCSSRAWKSSFKKRPPLLAK

SEQ ID NO: 44166 - protein, 85 aa, unidentified
  REGION 1..85: note = Description of Unknown:random_neg_ctrl neg_ctrl sequence
STGSEFLLEIEAEKFVYQIRSSTVKGMLKNAKFWEVIYLFVFLDAKADRTPCPMVLEDCKSFEEEENNQLSMNTIFMGDIIPKAR

SEQ ID NO: 44167 - protein, 85 aa, unidentified
  REGION 1..85: note = Description of Unknown:random_neg_ctrl neg_ctrl sequence
KENSVFFGASGFAFLVSNISDIPVILTIVWDIAGQANAKQLKTYTETAKKLTNKLVMATMIDDRARAKLKKSVWTSLHEVKLELT

SEQ ID NO: 44168 - protein, 85 aa, unidentified
  REGION 1..85: note = Description of Unknown:random_neg_ctrl neg_ctrl sequence
SSDLKVEERTCIATILSRGEPLYEMAIVKTSDGIWFENNTDAAYNPKELYITEVIDSNSKVRSFPLALPNWYVVKTGCDARPFTQ

SEQ ID NO: 44169 - protein, 85 aa, unidentified
  REGION 1..85: note = Description of Unknown:random_neg_ctrl neg_ctrl sequence
RNIVRIDIKVTMMRRREGSLTLIMKTEYEFASEVQIKYRARKKQMDPLDCLATFSAYRSELALGQSLSKEGTYTEARQNTHDHKI

SEQ ID NO: 44170 - protein, 85 aa, unidentified
  REGION 1..85: note = Description of Unknown:random_neg_ctrl neg_ctrl sequence
LYSMNVPALLTGSGQLVMKCVEENPTDYNKFSITINYAIEVKRSALFGTRPALAAFVLFKNLFKKVAKIWLNYVEPFVNKKDQLL

SEQ ID NO: 44171 - protein, 85 aa, unidentified
  REGION 1..85: note = Description of Unknown:random_neg_ctrl neg_ctrl sequence
SHDMLGRFTEFKKLNNGDVFSIPSMSLAPFVQVIESYKKFTIGGLVILRAIFFMIRPCDVTIGHVFALIVTPLWEGFIWELITSY

SEQ ID NO: 44172 - protein, 85 aa, unidentified
  REGION 1..85: note = Description of Unknown:random_neg_ctrl neg_ctrl sequence
TKDGAECTAKQIELCCHSAVKSGLWDSETFQNLERTGKNNGNKYIMIALVIIPLIFIIKDSLAKCCLGSTYDSWPTFGHVVVDAE

SEQ ID NO: 44173 - protein, 85 aa, unidentified
  REGION 1..85: note = Description of Unknown:random_neg_ctrl neg_ctrl sequence
TNNSDKSMSESMPEVEALLPEPDYVFEYPVYRNFDKSISAPGRLVASDAKLLFALQSPRHVPKVLEYKGETNEDLIKDKKASILE

SEQ ID NO: 44174 - protein, 85 aa, unidentified
  REGION 1..85: note = Description of Unknown:random_neg_ctrl neg_ctrl sequence
VRQNYSWSKPVIPEPQKLVISSAFCAIEIYKAKIKISRFERGSIKIFRTKVNIMSNILDGIYSDTISLLEIILSLTFHDFYSLEK

SEQ ID NO: 44175 - protein, 85 aa, unidentified
  REGION 1..85: note = Description of Unknown:random_neg_ctrl neg_ctrl sequence
VSRMSLLLSDNLNRLETEAILALFKFREILGPVVLPVESKGEFFESQRSYRSFPKETAALCRGYEAEQVEVENAPRIIYSMAKRF

SEQ ID NO: 44176 - protein, 85 aa, unidentified
  REGION 1..85: note = Description of Unknown:random_neg_ctrl neg_ctrl sequence
IFSPANLTQFQYADIYDSIEVVLKGLPPTPQIRIIAGHTIWIDKIYKFIMASPHRNLFQPLRPHSERIIAGLINPTRKRCLDVSI

SEQ ID NO: 44177 - protein, 85 aa, unidentified
  REGION 1..85: note = Description of Unknown:random_neg_ctrl neg_ctrl sequence
EYGFTDSEAIWEEYLLPLFIEKERCETKPQADIDKAKKTRGAAEHVGKLGKRMTDGAATLGINIFVYLKGTIFWFISIQKNILEA

SEQ ID NO: 44178 - protein, 85 aa, unidentified
  REGION 1..85: note = Description of Unknown:random_neg_ctrl neg_ctrl sequence
VLSFDGASIDEDSVPSSHLVEEVASKNFILTTLPLKGLVATFPGDEIDKSALFFTECSWDKRSEGFLDKTKFNELIRVIYENSEG

SEQ ID NO: 44179 - protein, 85 aa, unidentified
  REGION 1..85: note = Description of Unknown:random_neg_ctrl neg_ctrl sequence
GPVISKNIFYQIILGYIHELKGPIRRYKNNKVVSDQCICSVEMLDRDTFEDLIFQLGHKKKEAYDTGISLQGVTVICVTKYEVSK

SEQ ID NO: 44180 - protein, 85 aa, unidentified
  REGION 1..85: note = Description of Unknown:random_neg_ctrl neg_ctrl sequence
DRYSQSGFKISSDQLSGLTARTLGDRAFSRTDVIKEGDLKFALLLAYSKITRQIVLIAGKLVGSTRIVWPGGLDEDLIGGVWAFV

SEQ ID NO: 44181 - protein, 85 aa, unidentified
  REGION 1..85: note = Description of Unknown:random_neg_ctrl neg_ctrl sequence
TLCKLTIEPGTKIPNEGSDREPWYLVENFVAVVQKMATIVELGKSRIFLDEAVIINKILLYFIGGASDYSNLFMKELVFNKSLMK

SEQ ID NO: 44182 - protein, 84 aa, unidentified
  REGION 1..84: note = Description of Unknown:random_neg_ctrl neg_ctrl sequence
VEDLRKGFINRARLISPKNKDLEFVVYVQGNVCGLVYYFYFLSNTNVAWVGAYYVDSYNHIDESLEACLGHNGGFFAVWKDMIG

SEQ ID NO: 44183 - protein, 85 aa, unidentified
  REGION 1..85: note = Description of Unknown:random_neg_ctrl neg_ctrl sequence
DLKRMTTKFVSLTDMEYESELSYVFKMVSIDSVSKKLLLPANANPAIRANNTAADSITNKKKGEIKADDFEGHKSYRDSAEKPKS

SEQ ID NO: 44184 - protein, 85 aa, unidentified
  REGION 1..85: note = Description of Unknown:random_neg_ctrl neg_ctrl sequence
EFRMHKIVKENAAKSAWESADDRTMAGPNSIPGRDYKEAGRKPLKNTIPLSIPFDEGDPNGISKGQIGIAEPNLFKLYWSAFSCE

SEQ ID NO: 44185 - protein, 85 aa, unidentified
  REGION 1..85: note = Description of Unknown:random_neg_ctrl neg_ctrl sequence
EILGNERQNPTDSTYEGNLYGEMTIRTYKMNYFNKYIDGYVANIPLRNIQWTEARALPSNYSLSEIFSLGVGNDLHNLSHKMNAY

SEQ ID NO: 44186 - protein, 85 aa, unidentified
  REGION 1..85: note = Description of Unknown:random_neg_ctrl neg_ctrl sequence
GKYNIFSNATEGGPIFQTSSTKNALQGIDAPKFTIEIAVAVGIVIKKLDIETMLDGLKADCTGHLSCRHQEDMDDKVQKPAMNKV

SEQ ID NO: 44187 - protein, 85 aa, unidentified
  REGION 1..85: note = Description of Unknown:random_neg_ctrl neg_ctrl sequence
MSYMDKSTPKTYNTTTEEEDYFGGCDLLPYENVRLVYLASRILRGKAYKKFLPSLVASIMISTRDPNERGFETKDIAKALEVDGE

SEQ ID NO: 44188 - protein, 85 aa, unidentified
  REGION 1..85: note = Description of Unknown:random_neg_ctrl neg_ctrl sequence
LNFEGSDVVCKLLDIQILEEWYMTFKGTKNGTLYKMNGLIKIDYGWYIKFSEAAYCSRIPYPDRISYLTLQIIVRDSKATLIQNP

SEQ ID NO: 44189 - protein, 85 aa, unidentified
  REGION 1..85: note = Description of Unknown:random_neg_ctrl neg_ctrl sequence
KHFFDIIFDSARYSMSDIAKLISSITDVENYKNKCQDAQLKEIKIEQLDRDAYGSAVPMGLVETTDAKDGNDGIAPGFRIFFGAI

SEQ ID NO: 44190 - protein, 85 aa, unidentified
  REGION 1..85: note = Description of Unknown:random_neg_ctrl neg_ctrl sequence
AEFAREKIRPIGDTFHSYLAGKGSSKLESRNSELSLLKYIFRTILKHDAAKAAKETFEKKDWTVGEFFSSISTLILGIVELVEES

SEQ ID NO: 44191 - protein, 85 aa, unidentified
  REGION 1..85: note = Description of Unknown:random_neg_ctrl neg_ctrl sequence
TQLVTDGKALVYFLAYDHFDKKNKEDVMNKDYPFAEERFQSAICVYAQHPEPIIDERTVNPLGAAVIPLILSIKYFIYVQLRKYK

SEQ ID NO: 44192 - protein, 85 aa, unidentified
  REGION 1..85: note = Description of Unknown:random_neg_ctrl neg_ctrl sequence
FKVPYLLFINPMSPIPLVGVNFINNQFLFNFYKLRTHPFLLAVKCTYRLRLQFDVAIITYISISESRAMRASEENNAGSVILILP

SEQ ID NO: 44193 - protein, 85 aa, unidentified
  REGION 1..85: note = Description of Unknown:random_neg_ctrl neg_ctrl sequence
HANVGPNNDKNCNKVGVNAAVVRNYATFTSLDPLSMDEDPSDNRREDLALKNFMYMNKVKRGYADYGFQRYMAIQDKNAIIVLVA

SEQ ID NO: 44194 - protein, 67 aa, unidentified
  REGION 1..67: note = Description of Unknown:random_neg_ctrl neg_ctrl sequence
KKPIDAAFWSSYKIYDALEGQALTTLDVEYYIKIPFTVSNIAPAVKHFCLAQVHEEDIFIGFKCSRL

SEQ ID NO: 44195 - protein, 84 aa, unidentified
  REGION 1..84: note = Description of Unknown:random_neg_ctrl neg_ctrl sequence
VGLSIAGVIYGQKLKRTDCPSTASMELVEFSDGKIVLCKEDPDSSNHTSKFEDRLYSNHDKDSQKANNEALSLLIIIKRNFYPM

SEQ ID NO: 44196 - protein, 85 aa, unidentified
  REGION 1..85: note = Description of Unknown:random_neg_ctrl neg_ctrl sequence
MKGSSTRGKVDGLDSDITFYFVIALYADKVANIGFTGLPFESPSVLILIVIEIYIIKDKVSSNADNDISAPHVIILFNKKDILEV

SEQ ID NO: 44197 - protein, 85 aa, unidentified
  REGION 1..85: note = Description of Unknown:random_neg_ctrl neg_ctrl sequence
IYKEPNEYKVFSSRYYTFLDSVNTNKRQTVAKNCGHYACENVYNVTRQTTLESIKTNDDRKLAITDLATNDASLSDLDLEDAKVR

SEQ ID NO: 44198 - protein, 84 aa, unidentified
  REGION 1..84: note = Description of Unknown:random_neg_ctrl neg_ctrl sequence
TKLQRWYAANPNVDTDRTLGRGILTKPYQPYTTENWSMAVFTDRWFLPVKVFEGVAIIIKLTGEIMLVKNIYNSSSPRDPVSMR

SEQ ID NO: 44199 - protein, 85 aa, unidentified
  REGION 1..85: note = Description of Unknown:random_neg_ctrl neg_ctrl sequence
AYQPKPGFKETWQPGKEIGTLTLAKWKKAVGWRKPIRLIGSHLKGSRSSLIIELASASSLISDLHILGEGDDRIYSAESMEYAGS

SEQ ID NO: 44200 - protein, 85 aa, unidentified
  REGION 1..85: note = Description of Unknown:random_neg_ctrl neg_ctrl sequence
VFIVGLDFIVVFERCQLKEQSANNECNLNSVSNLVTENTAVVDLSTGKIVMNATRGILNLVELVTNVVSNFYLIVAADAIQSKNM

SEQ ID NO: 44201 - protein, 85 aa, unidentified
  REGION 1..85: note = Description of Unknown:random_neg_ctrl neg_ctrl sequence
DNRSGKYRIVDLRIYHHWEQYIDEEEPLNMNKVLKSSPILFEDKISSAYAAEESLSPGIVAGECYGQIVTTQENYLSRLAVVIES

SEQ ID NO: 44202 - protein, 85 aa, unidentified
  REGION 1..85: note = Description of Unknown:random_neg_ctrl neg_ctrl sequence
ELSHYLLELFGTDEIYMSRPLGQSNMLLTNNHCPPLIGFYASTVINTKYIVAFPTQNELDYSRESPVVLGSTRLVKASGGNLSNN

SEQ ID NO: 44203 - protein, 84 aa, unidentified
  REGION 1..84: note = Description of Unknown:random_neg_ctrl neg_ctrl sequence
NIIYLQKTRGLPVDIILLHKGKMADPDALDSSEYKRLGGDIKALELITVGSLFFAYGYYAPLSYSECFLSMKTAALTTKDKHDM

SEQ ID NO: 44204 - protein, 84 aa, unidentified
  REGION 1..84: note = Description of Unknown:random_neg_ctrl neg_ctrl sequence
STLGWGMNLIPNVGVLDRKESGRFVISHTQFMTSPQIDDPLYFNTYTERNTSQKANKSLIPNCIPLIGLPVYILENEYNRSLNV

SEQ ID NO: 44205 - protein, 85 aa, unidentified
  REGION 1..85: note = Description of Unknown:random_neg_ctrl neg_ctrl sequence
FDDYKVQYEVMQGAVLNLTQEPTEITPFKDGSANDSHGPDEVVLEGLVETSSSSSPIDVHVESNRLGETSKILDPKAMKAGTQRN

SEQ ID NO: 44206 - protein, 85 aa, unidentified
  REGION 1..85: note = Description of Unknown:random_neg_ctrl neg_ctrl sequence
GSRNTTSQLIWRPHLSIYNSLLRTNDLSGVAKPDIAGMYKYSIYLDKRYVPIDYRERDIGSILIQSCNGYTTPRLVSLAGPYIPD

SEQ ID NO: 44207 - protein, 85 aa, unidentified
  REGION 1..85: note = Description of Unknown:random_neg_ctrl neg_ctrl sequence
RILKRDMLSPFLLLANVLMGDHEKVPYRRLSSNQFFSQKLSGFARLTAGPVIAKIERVLSSKFSNIKASMDAIGEFNELVVKESE

SEQ ID NO: 44208 - protein, 84 aa, unidentified
  REGION 1..84: note = Description of Unknown:random_neg_ctrl neg_ctrl sequence
FWVAKNLIKDNRNDGNLLKYSPDIAGEDYMTIYGHHKFNGENQDDKIAILAWLLIEKAVFLASRDTYYTSMVYLLISRQHELSI

SEQ ID NO: 44209 - protein, 85 aa, unidentified
  REGION 1..85: note = Description of Unknown:random_neg_ctrl neg_ctrl sequence
KINKTEKLKLEDPKGFQEFNIKKIGLSELLDGYWSLLGDRSNAVFQGLDKTIGYWTTQDKDANTLIHEWIVVGSDIILARLTYPP

SEQ ID NO: 44210 - protein, 85 aa, unidentified
  REGION 1..85: note = Description of Unknown:random_neg_ctrl neg_ctrl sequence
SVWMERSGELKLGAGMPLGEWSIRKAIFHKMLLAMVYDLVEVMIGENQPNVAKEMKYKDVSMEEGRTGILHGGLSLYLLEYDNKR

SEQ ID NO: 44211 - protein, 84 aa, unidentified
  REGION 1..84: note = Description of Unknown:random_neg_ctrl neg_ctrl sequence
KYTGGVYGRTEAQGSPAKYKETELKPRVLFTTTYKRGKTNGTILHINTAWLLRLIGTKDIIIIAQMEYINVLTGEPIPETGIVV

SEQ ID NO: 44212 - protein, 85 aa, unidentified
  REGION 1..85: note = Description of Unknown:random_neg_ctrl neg_ctrl sequence
SSLCRLKPAVILYKSRRMTQQKGTGRIKFELVNEQEEIFAGGQKMGIKYNNYFYPLSSLNAEGLTLRNSEKELVSVENDLGKIFY

SEQ ID NO: 44213 - protein, 85 aa, unidentified
  REGION 1..85: note = Description of Unknown:random_neg_ctrl neg_ctrl sequence
EADGGHEMGICRYLNIGECLIEGENNMHPLALEMSMLTFRPVTYSLGNRGIKEDEIGKARRDWVFRGEPVIMQRMSKTIYGEEKL

SEQ ID NO: 44214 - protein, 85 aa, unidentified
  REGION 1..85: note = Description of Unknown:random_neg_ctrl neg_ctrl sequence
TASLMDQHKLAATDSTMGLYDFIHSITWVKGCRCQVGVEQIECNASASRGNDIIRSHYYEGPDGHRAGIKPFYAESKDQPDHFDM

SEQ ID NO: 44215 - protein, 84 aa, unidentified
  REGION 1..84: note = Description of Unknown:random_neg_ctrl neg_ctrl sequence
DRYQDDAPKLMKPLLVRLPGDSAPIEWVNWIALAARKEIHSYSLDEDNVAYSCVSRRYSDLAEANESDNFIQVQPDPLKLEVLN

SEQ ID NO: 44216 - protein, 85 aa, unidentified
  REGION 1..85: note = Description of Unknown:random_neg_ctrl neg_ctrl sequence
GHMVIPYRTEQGESNDEYKVGSQCITSNIAFRRIGFFKCCLTFEVETKSIRIWPIFARTYYVISNQEYMIGKDSRKFVLVEECEG

SEQ ID NO: 44217 - protein, 85 aa, unidentified
  REGION 1..85: note = Description of Unknown:random_neg_ctrl neg_ctrl sequence
EIIYYFVKKKKWSNILPFYATELRAITGIFESMDRNNIARSKHKHTYEEDNINDEFRKNPKEDFQRTKFIIKTAVLLDADSIKKF

SEQ ID NO: 44218 - protein, 85 aa, unidentified
  REGION 1..85: note = Description of Unknown:random_neg_ctrl neg_ctrl sequence
ILTGILGDERELMLKIVLKTVILNELQIVAANGGITGALGKIEDDSRLPIQLAYAKIATIVQVIVGIDGGWFRCDEKKAIVYTEV

SEQ ID NO: 44219 - protein, 84 aa, unidentified
  REGION 1..84: note = Description of Unknown:random_neg_ctrl neg_ctrl sequence
EGSDLVNVYLKDSVSILERATYKDSINVKPEISEMTEVRPLIADNGPCEGSIKTDDSSGVHQYTLSMETNVAKAHEAGQVRTAV

SEQ ID NO: 44220 - protein, 85 aa, unidentified
  REGION 1..85: note = Description of Unknown:random_neg_ctrl neg_ctrl sequence
QVDLFDDSVNSQVWRFPLTVTICILYKGYRAITLNAEADHLYVSSVAGPELAQFFGALLMVPGLIVVPMTENEALSNEISLYGSY

SEQ ID NO: 44221 - protein, 85 aa, unidentified
  REGION 1..85: note = Description of Unknown:random_neg_ctrl neg_ctrl sequence
SEEYSGVTAWEMRKTKSDSEKELVVLNQFKAQGKLSGYDRFPGVISDKSYLQSGIVQSGETLTPSVERVKAVEALCMRFDYFDDA

SEQ ID NO: 44222 - protein, 85 aa, unidentified
  REGION 1..85: note = Description of Unknown:random_neg_ctrl neg_ctrl sequence
EHYIMSIDFNSLLPVSTNNEIEWTSLIALKNYVGDEYREQIDPLYNPVARDIILVAREVAPPTLLIVFAVVYSSLLFAGRRGGIA

SEQ ID NO: 44223 - protein, 85 aa, unidentified
  REGION 1..85: note = Description of Unknown:random_neg_ctrl neg_ctrl sequence
IILTSPEELIDKKTNWKARNLSSYEDQLDEYAYPRLGAKLGNAFKIFLLVLSAPELLISPPKAMSMFRILVPFHNGSQQGYLEVC

SEQ ID NO: 44224 - protein, 84 aa, unidentified
  REGION 1..84: note = Description of Unknown:random_neg_ctrl neg_ctrl sequence
EISIYLESLVMFFYLWGSILMAVAEIEAETGSDSRIHFENIFALSSTVRQPGNKDKGSRGAMSEKSRLDIRTKELDFKHTTMSF

SEQ ID NO: 44225 - protein, 85 aa, unidentified
  REGION 1..85: note = Description of Unknown:random_neg_ctrl neg_ctrl sequence
LRKLQPWGLMLKSITCVKRTTLRFFLIRIFFQKVESPWRESTDCRASKHRYYYRAFLPTYTYYNTRALLREIDKGMNNESTPYHT

SEQ ID NO: 44226 - protein, 85 aa, unidentified
  REGION 1..85: note = Description of Unknown:random_neg_ctrl neg_ctrl sequence
VDQAPLNWRISVDKIGESTKGENLLTSGLTIRIIPGTVSYPCRATHMKFDAATHTNYYILPYATAQIYGGASRIDDSMNKYKSLL

SEQ ID NO: 44227 - protein, 85 aa, unidentified
  REGION 1..85: note = Description of Unknown:random_neg_ctrl neg_ctrl sequence
IKPVVRIAYIVDVKAQDTFRNLLKYQILGGGKLSAIHFVKGKKPIVVGDAVYEGTILLGEDQLTAKKIEIKPDDPVIIGIVVGLA

SEQ ID NO: 44228 - protein, 85 aa, unidentified
  REGION 1..85: note = Description of Unknown:random_neg_ctrl neg_ctrl sequence
REVSYKGINSYPKVVSVELAMAKVSAECSLFLALLGTATILAKSFGLDIFEDTSFLGDALEEGSKLNLSIGYGTDLKAMTKEKIP

SEQ ID NO: 44229 - protein, 85 aa, unidentified
  REGION 1..85: note = Description of Unknown:random_neg_ctrl neg_ctrl sequence
NAMDKILISIWLQDVKKTQKTDKKYTLGESTYMASKNGYSLADRTTISGSDIAFRTDGEDASDGPLADALGGDKLIFRRGARPCP

SEQ ID NO: 44230 - protein, 85 aa, unidentified
  REGION 1..85: note = Description of Unknown:random_neg_ctrl neg_ctrl sequence
KSPDREIIKQGPGAVEKAQNTDVNYIKLGKTRRDSPGNLSLLRYEGLVIAEMSVNNYTIEAECDNTLVYPEKGSFLPIGEKYKDL

SEQ ID NO: 44231 - protein, 85 aa, unidentified
  REGION 1..85: note = Description of Unknown:random_neg_ctrl neg_ctrl sequence
GRAGVFNDERLEDGVWKAKYGYAEITDSINRTPFFDIVRYLLPLYFNSEQSSKLIKTGQFPFNIKIGQPIGPGKLLVNKVSALHG

SEQ ID NO: 44232 - protein, 85 aa, unidentified
  REGION 1..85: note = Description of Unknown:random_neg_ctrl neg_ctrl sequence
IPHDEYTYYIRVAGELINPMLVSGRPTSVNYNMAVIVLSRRSSVHGMDEETFIRFGKDNLAGQLGTPIILSLAKPLPVLPMRYAE

SEQ ID NO: 44233 - protein, 85 aa, unidentified
  REGION 1..85: note = Description of Unknown:random_neg_ctrl neg_ctrl sequence
LADVAYSTVIGIVQKKEGVDAVKEIGALPPAGIWLTVSRVEQAFLKYGDPKAGVSILLFPKERRDKKCFVSRALTDLLVEEAVFA

SEQ ID NO: 44234 - protein, 85 aa, unidentified
  REGION 1..85: note = Description of Unknown:random_neg_ctrl neg_ctrl sequence
YEGESKKISSKNKKVILGVSTVGLPVNALDAPIQVTLVNYTVGQANAPIEGPWYAAIGVEHDWKSNVTLTPDKKQPKVLSAIYIS

SEQ ID NO: 44235 - protein, 85 aa, unidentified
  REGION 1..85: note = Description of Unknown:random_neg_ctrl neg_ctrl sequence
EDRMGNFYVTVIQTHIQISTDTKHSPVINQDISTWDIPPVRPVSINIAIRTLKQLQILFYYHSKLSFEIKDRTGKFVKLPYSVGY

SEQ ID NO: 44236 - protein, 85 aa, unidentified
  REGION 1..85: note = Description of Unknown:random_neg_ctrl neg_ctrl sequence
IKNPNTPEDSLPHRYIMVYVYEATTDLFSGGYKHLTLIGRKNRVNSKTNSAVLNITSAAKVFPNIRTEPLADLALAANMDVRLEE

SEQ ID NO: 44237 - protein, 85 aa, unidentified
  REGION 1..85: note = Description of Unknown:random_neg_ctrl neg_ctrl sequence
HSYWTKTYSLAADTIASMAEQSDVAFAISKGRTDITACLRVLVMALDFWQKVVCSFFNLAPDSGIRCIDTYRYDTIIRKQSNSYF

SEQ ID NO: 44238 - protein, 85 aa, unidentified
  REGION 1..85: note = Description of Unknown:random_neg_ctrl neg_ctrl sequence
YPDSRSVEYYVKVSSAASSYTNLSGKMQIIVTSAIFPTSTIFLCTDFKSFYNLPFIQERRSGLHTTKLPVSSCTQASRTGLEAGL

SEQ ID NO: 44239 - protein, 85 aa, unidentified
  REGION 1..85: note = Description of Unknown:random_neg_ctrl neg_ctrl sequence
DGITFGIMSGILKEWLIVEKRKKAAEVKEPCFYISLKSEDMSQLMTLFHDGSLKFKVQGGPFLNEIYKPRRRYNLGFTVSCIVPL

SEQ ID NO: 44240 - protein, 84 aa, unidentified
  REGION 1..84: note = Description of Unknown:random_neg_ctrl neg_ctrl sequence
EFAMLIKKMILLAIGDFHSRRYIGSYLMVLYRIALYVEDNVIPCSKMENLQLDESTLLTEYTKAMQIKDWAVRKWRQWKYVERA

SEQ ID NO: 44241 - protein, 85 aa, unidentified
  REGION 1..85: note = Description of Unknown:random_neg_ctrl neg_ctrl sequence
KQEAEFERKLMLVRDITAIKDRGPLSIDADIVLCMRTFQRLKSMSLRIVEGEYIAPGKLRIFSIFETEADRSIELWTEIYGEDNL

SEQ ID NO: 44242 - protein, 85 aa, unidentified
  REGION 1..85: note = Description of Unknown:random_neg_ctrl neg_ctrl sequence
YSELSRQLPLAETELISLVPDKSQYHCLNKMASDPQGIGIIAICRYWNVYKFEKLIIYIEFNDSSLPEFLIQRYFEQDFQSLSEL

SEQ ID NO: 44243 - protein, 85 aa, unidentified
  REGION 1..85: note = Description of Unknown:random_neg_ctrl neg_ctrl sequence
SRKYVIGARPANSPYLTSWQYYLAIDLAASDSVGIWLKFLAQNPSINKKVPITEANDFMGKLYRPIVSDLKDGEPAVCTRFPDLR

SEQ ID NO: 44244 - protein, 85 aa, unidentified
  REGION 1..85: note = Description of Unknown:random_neg_ctrl neg_ctrl sequence
GIFYNIRYGALARDFHRVMFKNEATPDSKTKTEGGYKNEVAANLNQAMNNIEAFFVHYECLYPSYEHVSILKESDITTLESLGPE

SEQ ID NO: 44245 - protein, 85 aa, unidentified
  REGION 1..85: note = Description of Unknown:random_neg_ctrl neg_ctrl sequence
LTLSPLVTEQAIIVNALAFSTTDISKLLYGNRTEVLMNNTEGVLSGESGEFYIFHNGETITVSTEYLILGMFQFKDFVAAEVPTQ

SEQ ID NO: 44246 - protein, 85 aa, unidentified
  REGION 1..85: note = Description of Unknown:random_neg_ctrl neg_ctrl sequence
NGILEDKYLDFPVKEFWPVGPSDVASVEGDVLDSKNNLYANKKDKIPADYSGEIENCTYALNLYLSVFPLVSSKLTVKTALLQRI

SEQ ID NO: 44247 - protein, 85 aa, unidentified
  REGION 1..85: note = Description of Unknown:random_neg_ctrl neg_ctrl sequence
TKEISTRGNTCSCGNIFITMKLYWCTDLDCGFRIKPCKRYMPLLLSTGKDKDANLVGIMILRDIGTHKLPCILRVDLSNRWPWDW

SEQ ID NO: 44248 - protein, 85 aa, unidentified
  REGION 1..85: note = Description of Unknown:random_neg_ctrl neg_ctrl sequence
ERIIGSLRNVTGLLFEMSGNLSDIPSGLSIKECSTKRLSTANYQVASIENAASIVFKPYVEEIQCGELHLPARNEAKAGESNVST

SEQ ID NO: 44249 - protein, 85 aa, unidentified
  REGION 1..85: note = Description of Unknown:random_neg_ctrl neg_ctrl sequence
NLSINDIITRLVKNGGLIYYPPYEAKASIYTKHNSDVSLIFVASKPETPYEKITGKALRIKTNCPPFGATPDLHVNNAGMYWFDL

SEQ ID NO: 44250 - protein, 84 aa, unidentified
  REGION 1..84: note = Description of Unknown:random_neg_ctrl neg_ctrl sequence
VHYNRKNWAPYFTEVLTYIQLKITLALYPKSAILKTLGPIEELNVHSLFAEGITQDSGNAVNLSDVSYGAEGNLIRLLSLKLTF

SEQ ID NO: 44251 - protein, 85 aa, unidentified
  REGION 1..85: note = Description of Unknown:random_neg_ctrl neg_ctrl sequence
ALIEVMQDITRDIHRSSSLNEVKPIADVGARSFLQSPPDSPETPVIINEALGDLIAHYLVIDKNDSLAEISQKGILNAESPHGLF

SEQ ID NO: 44252 - protein, 85 aa, unidentified
  REGION 1..85: note = Description of Unknown:random_neg_ctrl neg_ctrl sequence
LAYFLSIVLDLKIQRLFSINSWELDMALFFLVGDKRQRRYSALDSTPNFSDFGGSKETKFTRPYLTAGLFYEFKRVQIKTGTHCH

SEQ ID NO: 44253 - protein, 85 aa, unidentified
  REGION 1..85: note = Description of Unknown:random_neg_ctrl neg_ctrl sequence
HEDIEYLKMVRHLLADYTESNNIIQMKGTTDRREGLGTRLLKIRWFYVQGKLPFENPEPHNFHGIIEEGLIDHGDMISYQVQGEY

SEQ ID NO: 44254 - protein, 85 aa, unidentified
  REGION 1..85: note = Description of Unknown:random_neg_ctrl neg_ctrl sequence
AIVSPKLLGLESGVQGSLVKKDEFQIIPCSGNEALGLAVSCASISDSDCPSCTVAYDEYNDIDLSELTIESEDESMDVHNFTYSI

SEQ ID NO: 44255 - protein, 85 aa, unidentified
  REGION 1..85: note = Description of Unknown:random_neg_ctrl neg_ctrl sequence
ISAVTESACPINWANEVVTSIVDGSYLMRLIGDFTDVLIQPVPRMFLGITESPTSYATPDLQGKDRKTTPQQGFKGENYVEIVTF

SEQ ID NO: 44256 - protein, 85 aa, unidentified
  REGION 1..85: note = Description of Unknown:random_neg_ctrl neg_ctrl sequence
HKDHGNKLSLFPAKLSKDVKNMDRLRKKFKNAIEAKGVITGMKKTSMSGYIDTGRNEESGDIALTSGLHHTPLSPEHAIGKMEYS

SEQ ID NO: 44257 - protein, 85 aa, unidentified
  REGION 1..85: note = Description of Unknown:random_neg_ctrl neg_ctrl sequence
YPSGRTKQTNPEYAQEKALTPSLQVIVDIVIYAEVIKSFVGEKIPLKYYLVNPKKDEYTVIIFGEIGCNTYVFSIATTGFPLREY

SEQ ID NO: 44258 - protein, 85 aa, unidentified
  REGION 1..85: note = Description of Unknown:random_neg_ctrl neg_ctrl sequence
YSDVVENNVWIDSFDINSGEAFANLVNDADDSRYLNGQFEQLYCLEVYFYKMNIQSAKKVKTELLIMRKYVFIFDVTGPVFSLLA

SEQ ID NO: 44259 - protein, 85 aa, unidentified
  REGION 1..85: note = Description of Unknown:random_neg_ctrl neg_ctrl sequence
ILLLKCATILTFLNVISVSEDIALDVPSLSTSGLFNIIYILEVEITATLLFLLYAVTFTRTNSIYGYSYEGRTYRLDSQQSITIS

SEQ ID NO: 44260 - protein, 85 aa, unidentified
  REGION 1..85: note = Description of Unknown:random_neg_ctrl neg_ctrl sequence
LNRASIQISSNRKDLERTLAGDSLSLLSSRKNEISALLPYECYIAEDKAYVVPNIDAIKVLLGLACDSYVNKDSKIETAAGDKTI

SEQ ID NO: 44261 - protein, 85 aa, unidentified
  REGION 1..85: note = Description of Unknown:random_neg_ctrl neg_ctrl sequence
MKTIHLDSGQDWVLGEGWEPPLKIILTSTDTPISPKDGDEDPESDSTAPHFVELQIHSGKKHDRGDRKIQADVTIQETKVIIAEG

SEQ ID NO: 44262 - protein, 85 aa, unidentified
  REGION 1..85: note = Description of Unknown:random_neg_ctrl neg_ctrl sequence
KDYFKILYGEENFADQNYKIGVRGVNVINMKDTTKGTGNNFFSTYSQVKNDAFFPQISRVRQVVSQPKHFDPDPKVKNTSKITIS

SEQ ID NO: 44263 - protein, 85 aa, unidentified
  REGION 1..85: note = Description of Unknown:random_neg_ctrl neg_ctrl sequence
IVELQKLGRPRSLKISASANGLYLRGKPKKYNEIKICLIFKVNFVGRDMRADIEIGNLYRSVIVLEEWDLKKVVSKPNARNSIKK

SEQ ID NO: 44264 - protein, 85 aa, unidentified
  REGION 1..85: note = Description of Unknown:random_neg_ctrl neg_ctrl sequence
GKEAITPNRGVTIFVMEHYVTLLAYGIEKQWKDVTVKKKVIEYNTEAQGLGIGLYKINELVAQAYATMILTGRIKKDAIDLRRLE

SEQ ID NO: 44265 - protein, 85 aa, unidentified
  REGION 1..85: note = Description of Unknown:random_neg_ctrl neg_ctrl sequence
RADIFFGCYPSHTVYDFPGTKSENSDIIIMDGGYLLGVDRGKVQGEVKLSALQMRMNSASTTMNMVKVDSSMMLGLGLFASYDLQ

SEQ ID NO: 44266 - protein, 85 aa, unidentified
  REGION 1..85: note = Description of Unknown:random_neg_ctrl neg_ctrl sequence
GVKGPWEASALAGRIFDLTYFATYFLTNSFFIKGELANLLLNKMKRKANTGLDNTSFEAEAATGDFPMSSSGMDIFTKSIVLTSI

SEQ ID NO: 44267 - protein, 85 aa, unidentified
  REGION 1..85: note = Description of Unknown:random_neg_ctrl neg_ctrl sequence
VASNDGNEDMLGGTEAHIENARCVNVAEKVGVRPNCEMIKLYYKNMTCPYIMVIGSLEGHVVYTIDCLRLSLVHGVAFYKKPLEI

SEQ ID NO: 44268 - protein, 85 aa, unidentified
  REGION 1..85: note = Description of Unknown:random_neg_ctrl neg_ctrl sequence
GIPNKVRFDLVYSAFLLLSILLMRINTSKEFMSITLASKEDSNKNRSVGTEKSYPKIALLESGIDKKFETTWYTSKKENTVGAVP

SEQ ID NO: 44269 - protein, 85 aa, unidentified
  REGION 1..85: note = Description of Unknown:random_neg_ctrl neg_ctrl sequence
NRPSYINTLKLYVNKLLASAPVRLLVVLKGQGAEYMIISNSCMTFKFLNALYQWRWSGPGPNFEVVLLIGLDIYAEAVAGGIVID

SEQ ID NO: 44270 - protein, 85 aa, unidentified
  REGION 1..85: note = Description of Unknown:random_neg_ctrl neg_ctrl sequence
SKIEHRLCDKNKGDEIKVEVKKELGVKSGYMSLREDGFKYPNVSRNTLWMTYAPLCNRWIIDFVFSNIRLEVEPTCETRVKAFEV

SEQ ID NO: 44271 - protein, 85 aa, unidentified
  REGION 1..85: note = Description of Unknown:random_neg_ctrl neg_ctrl sequence
YIQIRKTEDKDGRGMPVKSDSAITTVNSENLIKPILDIAWFPSLSIEEKICTEDFALYIKYAWEDQLSAGILLQSLDPKEDKVSY

SEQ ID NO: 44272 - protein, 85 aa, unidentified
  REGION 1..85: note = Description of Unknown:random_neg_ctrl neg_ctrl sequence
KGVGGRQPLKWRNVEIICIDKSNNLRPHNGYEVIYARIDAAAHVILDVRGDIKYILSIESIDCDGGVVLKKVLRYYTEQEGIVIV

SEQ ID NO: 44273 - protein, 85 aa, unidentified
  REGION 1..85: note = Description of Unknown:random_neg_ctrl neg_ctrl sequence
GPLQYAIIKLFTNKEGFQRWMNTSPNPNATDRFEKDDVDLTGVLADEGDPMTTYCGTEGHTLDHLVKETYEKLEIELPYTLMRKY

SEQ ID NO: 44274 - protein, 85 aa, unidentified
  REGION 1..85: note = Description of Unknown:random_neg_ctrl neg_ctrl sequence
VLLYMFLSSMYFHVFVNIHNMAANALPLHSRESCEGGAIGHKKIGLYYITEGIRENAWTESDKIYRLVAPKDEYWKTMSIVILKV

SEQ ID NO: 44275 - protein, 84 aa, unidentified
  REGION 1..84: note = Description of Unknown:random_neg_ctrl neg_ctrl sequence
AKNQLKISDPRGGDMILLYKNRGCMSETGSSVEVIQVSAVWRITLDNVNDPNLITEYGQKLPERTESDLGFQTERSQSENKKKQ

SEQ ID NO: 44276 - protein, 85 aa, unidentified
  REGION 1..85: note = Description of Unknown:random_neg_ctrl neg_ctrl sequence
ATASFTPMNSMINLNMSLQNGAQAYYSKFSPLDNKFKAFSDGLLHKLINMSGTILSEGNCYDSNSTGAQDYVIDKATKKIFTILF

SEQ ID NO: 44277 - protein, 85 aa, unidentified
  REGION 1..85: note = Description of Unknown:random_neg_ctrl neg_ctrl sequence
ILYEVHAKKGNDAVLNGKSREALNVDDIYKIDCDAAPGVTHGIDEGFREPIKGIGITFKQKDHRDAIVNEGIIYKLLLTGIFLVD

SEQ ID NO: 44278 - protein, 85 aa, unidentified
  REGION 1..85: note = Description of Unknown:random_neg_ctrl neg_ctrl sequence
ESGLPSAYLTKAIKRDSDYQRIAYLMGSIRNNDTFVWDYDVSDLLAVDLFNTPSEVAEKAWNINSAERLVMSDILGLLLNYTKNI

SEQ ID NO: 44279 - protein, 85 aa, unidentified
  REGION 1..85: note = Description of Unknown:random_neg_ctrl neg_ctrl sequence
KTTFLVDKQIKCRDEDFIYKKIVTSAVGSMYEETDGSKYYLTLSNQIFNDGQGAREMVESGMAIAYNRILAVNPITYESFRLKNR

SEQ ID NO: 44280 - protein, 85 aa, unidentified
  REGION 1..85: note = Description of Unknown:random_neg_ctrl neg_ctrl sequence
GSQATEVIYGASIFASFTKVPTLNPEMKTLLFKYKPGKGEGTHSNRAAEWNLEELFDGLLLRELGGVIKMIRALMCPLCNLLIAL

SEQ ID NO: 44281 - protein, 85 aa, unidentified
  REGION 1..85: note = Description of Unknown:random_neg_ctrl neg_ctrl sequence
VGLAEPALLMACTVSLAGILLDIMIAKSESSLRFFSAIKELIDATTASLSSINIVPFPVHGAFSSSRNDETVTSSKEAEFAKEYS

SEQ ID NO: 44282 - protein, 85 aa, unidentified
  REGION 1..85: note = Description of Unknown:random_neg_ctrl neg_ctrl sequence
SIDYAAYPERKKGGKKIKTALMYAVRQYGIKIIGESEWTVIENAIFSTYKMQGLENIVIKVYAIGPIPCGIRKIFIQVLLIWQRL

SEQ ID NO: 44283 - protein, 85 aa, unidentified
  REGION 1..85: note = Description of Unknown:random_neg_ctrl neg_ctrl sequence
SETDGAGKIVFEPPGGAKLKSAMHYGVSGQYKYLDEILNKGVDLSNLELVRHYDALALTIGNTYSVELLFNCHVIKGITPLVLDY

SEQ ID NO: 44284 - protein, 84 aa, unidentified
  REGION 1..84: note = Description of Unknown:random_neg_ctrl neg_ctrl sequence
VISYESTVFTTLIIPDCDARVLLKKVVKIKDLVIGRAVVDMNDNDCPEFYPIKFVRYQFWNETVHAINTDICLAATYAGKKDGK

SEQ ID NO: 44285 - protein, 85 aa, unidentified
  REGION 1..85: note = Description of Unknown:random_neg_ctrl neg_ctrl sequence
HAEMALKFRLPWAPKGKTIAQMLTILKNIIASTLDFYRNLKNFQKCFYHTKFFIPFQYDLSSCYKDDEENEEYWHADSIAPRLII

SEQ ID NO: 44286 - protein, 85 aa, unidentified
  REGION 1..85: note = Description of Unknown:random_neg_ctrl neg_ctrl sequence
SNLMYSFRFLDALSGVWGLRVLLAIENHIEMFRPRKESLSYYQAQGPSPKIWAYKHATKIANADGVENVGILNESGYLFYRSSNR

SEQ ID NO: 44287 - protein, 85 aa, unidentified
  REGION 1..85: note = Description of Unknown:random_neg_ctrl neg_ctrl sequence
RGHDSKVVASQGNIVSINAEDKETNPKIGDQYTLKDPKVLGRNVQATLYKTFREKSTVVKILVIKSVGKVYLSELLQGGKNHTNS

SEQ ID NO: 44288 - protein, 85 aa, unidentified
  REGION 1..85: note = Description of Unknown:random_neg_ctrl neg_ctrl sequence
LTEADMVKESMFYRTVNGPVDTSPKIKYMPLIYFNDGKVITVAWTEEPLYHVKAVNLTKSLCTYVEAEDINEFSQRDDVFDICMN

SEQ ID NO: 44289 - protein, 85 aa, unidentified
  REGION 1..85: note = Description of Unknown:random_neg_ctrl neg_ctrl sequence
DYLDERSVTNDSEKIKYGKLGSLLVFAFRLLEGIPFPLKISPEDLIFFMRTVGAIYFTTNHLESEKLIYIVLGYSENLIFYIMAN

SEQ ID NO: 44290 - protein, 85 aa, unidentified
  REGION 1..85: note = Description of Unknown:random_neg_ctrl neg_ctrl sequence
ANLNLTPLKAEQKELAEAPETRTTTKMEKMKEYQNDYYSYVQLEGESTRFSELNKGNTVAIVVLGVEDSVGKVIMVLGTLTAQWG

SEQ ID NO: 44291 - protein, 85 aa, unidentified
  REGION 1..85: note = Description of Unknown:random_neg_ctrl neg_ctrl sequence
NNIRDEFTSVQVEQSEQPDKKVYNAYEAINVREQDVLDDPRSFKRRPNEEAYPKLANLAQITRFCEFITSGQTDFGRVRKEVYVF

SEQ ID NO: 44292 - protein, 85 aa, unidentified
  REGION 1..85: note = Description of Unknown:random_neg_ctrl neg_ctrl sequence
SVAHVELPNFIPDQDLEDLRLYKRSRVHTDKQTVEIGIMFFIPSYLGEGNLYTPPTALVITEEEMNLDEVRRKNKGGVSYAKLID

SEQ ID NO: 44293 - protein, 84 aa, unidentified
  REGION 1..84: note = Description of Unknown:random_neg_ctrl neg_ctrl sequence
DFLIGWMRPFAGIDKKAYFNHASMGSINVEYHKSLKLGGLHLEGVGFTDYLANPLLNNGKPTLGEKSVFYEVVQLAEDVSIWLV

SEQ ID NO: 44294 - protein, 85 aa, unidentified
  REGION 1..85: note = Description of Unknown:random_neg_ctrl neg_ctrl sequence
AWLDVQRRPSDHSKQENSEPKVYLSKDPIAFEKLNTLDGDYYKASPDSSRLYPVLGHRKVSSVQSAQDQVLKYLLNYTATVFILA

SEQ ID NO: 44295 - protein, 85 aa, unidentified
  REGION 1..85: note = Description of Unknown:random_neg_ctrl neg_ctrl sequence
SKAFNNKIFMGVFLLQVIVKYSGLEFGLEIGKVHKINQCKIPSEEILLVSISVVMVTVESIRYLFYQHNDLPAGAFKSTFYLLGE

SEQ ID NO: 44296 - protein, 85 aa, unidentified
  REGION 1..85: note = Description of Unknown:random_neg_ctrl neg_ctrl sequence
GSTELLGPNFVGGYCLLSKARVDGALKAIELKRYAKGIKLSYDWCAKCKGVAKDLHKHNAKVKKALKSRSDSLSLGTRNWDVVAK

SEQ ID NO: 44297 - protein, 85 aa, unidentified
  REGION 1..85: note = Description of Unknown:random_neg_ctrl neg_ctrl sequence
LNDIFLVVGPNLLAEIGKSEGIAHESASFTLLFWVGGIGAHLGILITSGYRLGIYHKGNVQTECSFIRETPACKYHQSGLIFTSV

SEQ ID NO: 44298 - protein, 85 aa, unidentified
  REGION 1..85: note = Description of Unknown:random_neg_ctrl neg_ctrl sequence
IRAIIYQYHAIILEVFGAIKEYNAVFILIVNDRADYEDYLLKKAGHVASSNTIIFKTAPIDESVNFFNWKRQKVNIHIMYNSELV

SEQ ID NO: 44299 - protein, 85 aa, unidentified
  REGION 1..85: note = Description of Unknown:random_neg_ctrl neg_ctrl sequence
AKIENTEGEQQLHLDMIELTDSLDFFASYCEVKLPPRAFFIFEPSPIRMDKEALYKYRAFAVSLHRLIIYNGKLFAESVSVSAGK

SEQ ID NO: 44300 - protein, 85 aa, unidentified
  REGION 1..85: note = Description of Unknown:random_neg_ctrl neg_ctrl sequence
FIFLEMHCTDLGAKNIAIRADTAIYKYEKVALPKDCQRLIYSSFESVIWCRCSHVRQGNVSGGVRSMLANTFENNEQCQNTQCKD

SEQ ID NO: 44301 - protein, 85 aa, unidentified
  REGION 1..85: note = Description of Unknown:random_neg_ctrl neg_ctrl sequence
PTILIIAHGLPNGIQLLHKDGTTMRHPVKSNYKNEYMIDMDMSVVFKLGRYIIYSASNIFKVCQIDIIRGALSVTVFNTTESNPM

SEQ ID NO: 44302 - protein, 85 aa, unidentified
  REGION 1..85: note = Description of Unknown:random_neg_ctrl neg_ctrl sequence
AETPVCFPSIDDLVSTSILALGRIGFSFQDDTSNIACWAYDYMGLPEIILVASYSKINHEGFEIEQIDHLTEPIGGSLSECTPLE

SEQ ID NO: 44303 - protein, 84 aa, unidentified
  REGION 1..84: note = Description of Unknown:random_neg_ctrl neg_ctrl sequence
RDPKTVNYSKIVRDVKKPFRSGNTLNIDKEDEETLGLCAVLVQSHDCLVQSSVFEEKFLKSSTSGKLMHPLRENGFYDLSIPIV

SEQ ID NO: 44304 - protein, 84 aa, unidentified
  REGION 1..84: note = Description of Unknown:random_neg_ctrl neg_ctrl sequence
TSPPQPVVVISYFKPRAYTLVGVMEKQDSTDGKSKKIVRETAKPIYGNKFGENEGIRTVHKENNKQSHYEIIFGGVLTKNFHNR

SEQ ID NO: 44305 - protein, 85 aa, unidentified
  REGION 1..85: note = Description of Unknown:random_neg_ctrl neg_ctrl sequence
ALALLLSDARCESGYKRVEQLEPYTNKDVSERRNRSEDLIDIEILLAIQDIPKANISFEPRVLHLSERNDVINLVDMSPIFKVPE

SEQ ID NO: 44306 - protein, 85 aa, unidentified
  REGION 1..85: note = Description of Unknown:random_neg_ctrl neg_ctrl sequence
LKRITLHKFGEEKILFEHIGPITGPSDDFYLDDDSVLLSYGFRPAPIQRAVFALVIFHLRSKHKLVFLNKNFNTAGMVKDDSLYQ

SEQ ID NO: 44307 - protein, 85 aa, unidentified
  REGION 1..85: note = Description of Unknown:random_neg_ctrl neg_ctrl sequence
YVATDDAKLRLILDKGMSVGADPIAVYYNIEFPNPVWMKKTILSGMEPGSSITGLIYKVDLFANGTWPKAVASNIGQPTNLIAFV

SEQ ID NO: 44308 - protein, 85 aa, unidentified
  REGION 1..85: note = Description of Unknown:random_neg_ctrl neg_ctrl sequence
NISARPNQSLSGQLNLGIILKLLDLKKDHFTKNESYDNDKDLDEVGRFQYKPIVPVVFIINDYFVLFSIWKWEALKLIRVVNESC

SEQ ID NO: 44309 - protein, 85 aa, unidentified
  REGION 1..85: note = Description of Unknown:random_neg_ctrl neg_ctrl sequence
KEKGNPQLTNHQGFDISKQLPIKSVYLDITSFTDLTVNIRGKEFDDISHGNLLAGMTENLEVREFWNIFFKVIWVLGETKSIVIY

SEQ ID NO: 44310 - protein, 84 aa, unidentified
  REGION 1..84: note = Description of Unknown:random_neg_ctrl neg_ctrl sequence
KLDGLEDFPIEVILGPFKYTTCNQAFFKMRPNVTKLYSANKSTENYSFKILTESKGQGGDSIDSSVLYPFDPSPIEELAQFTLD

SEQ ID NO: 44311 - protein, 85 aa, unidentified
  REGION 1..85: note = Description of Unknown:random_neg_ctrl neg_ctrl sequence
LSFEEVVKGKDEVSVRILKNNKFVSKGLLLPTTIKERKRATLRAEGRLDNTDVVGTQIREDSGKIIDDEPNNANLTVDFFNYSAM

SEQ ID NO: 44312 - protein, 85 aa, unidentified
  REGION 1..85: note = Description of Unknown:random_neg_ctrl neg_ctrl sequence
MMWFILKSAQVIDWKIEINVEKLLKARAIGLILSVEEFFGVRNIIWEPTAETEAGVCLDPSIAMTCQNRRSDYKGIKFLVEETTF

SEQ ID NO: 44313 - protein, 85 aa, unidentified
  REGION 1..85: note = Description of Unknown:random_neg_ctrl neg_ctrl sequence
DLFLYSVLWQRAEDEGYTGVRYIMGSHNCQNCVYTFLTADKLASLCYLIDILCRVIGADLFVINGSAGSSESAIAVLQIKIGVIY

SEQ ID NO: 44314 - protein, 85 aa, unidentified
  REGION 1..85: note = Description of Unknown:random_neg_ctrl neg_ctrl sequence
GNILSIFLYISYDVIDTIKYSIRITKPKVGWLLGSDYYKSNVFLADAIPDRATLTRIWYSITGLKKILTEKHPNMVERVVRDESP

SEQ ID NO: 44315 - protein, 85 aa, unidentified
  REGION 1..85: note = Description of Unknown:random_neg_ctrl neg_ctrl sequence
ELSANCGISLLVEALHSYTVTNIHSGLIDFMPDWIGGSDFVALYYYEEAAIDATKFLEPCSTKMVNPKPSPRSHYLNFSEELMNC

SEQ ID NO: 44316 - protein, 85 aa, unidentified
  REGION 1..85: note = Description of Unknown:random_neg_ctrl neg_ctrl sequence
VARLKVAACTKLLRVSKSMDSSDTILNRDLKYIPKFKAATGRELFKGEQQADGVPSNHFGLMVASQNADINHIRLVEVEKRYFIH

SEQ ID NO: 44317 - protein, 84 aa, unidentified
  REGION 1..84: note = Description of Unknown:random_neg_ctrl neg_ctrl sequence
QMAAGSDENKFTFDPEGYPITPTLLKIKKGDKKAIVFYTASSPILTDEIVNKKFGIFRYYTSLGHISIIVTEGFSHWFPFKRVN

SEQ ID NO: 44318 - protein, 85 aa, unidentified
  REGION 1..85: note = Description of Unknown:random_neg_ctrl neg_ctrl sequence
GRFFALTKNTGYCTEYKSMTANGKAKNQCWWKGEISAYETIIHYVSVATSYLRTELIWNEGDVKSDCGDFALLKTWIKDITSNTG

SEQ ID NO: 44319 - protein, 85 aa, unidentified
  REGION 1..85: note = Description of Unknown:random_neg_ctrl neg_ctrl sequence
PYGLYDYQLIFEGDSVKQKKSNGITATGPVNALKPGLAIDLWEDLLIPVFLNKLKNFGQTVSDKGSVIAAAKKVAVDPIKSTEDV

SEQ ID NO: 44320 - protein, 85 aa, unidentified
  REGION 1..85: note = Description of Unknown:random_neg_ctrl neg_ctrl sequence
NEGYICPNLYANVDNIGVFQEPIGSNNEPDHTINVSIKTRDRGRSDAFNTHLSELNNKISIRTIIGYCTEFRLLSRTSNFEIRVK

SEQ ID NO: 44321 - protein, 85 aa, unidentified
  REGION 1..85: note = Description of Unknown:random_neg_ctrl neg_ctrl sequence
LYDSEGLGHTGPLVGVYRGDHVLELNNLNDPDLVEIYMEDKLVAVLEADIEQFVKLVLECEKKSIIGLEFVMDILDQIAQIYNYA

SEQ ID NO: 44322 - protein, 84 aa, unidentified
  REGION 1..84: note = Description of Unknown:random_neg_ctrl neg_ctrl sequence
MDSTAPLALKILLISRYDLAAGMTITILWKIICKMRSPDSAYFASKYTDPAGNTYAHYLKRINEMIWDKSIFFIKNLYVYTKNS

SEQ ID NO: 44323 - protein, 85 aa, unidentified
  REGION 1..85: note = Description of Unknown:random_neg_ctrl neg_ctrl sequence
YNGMDILDLILYMNDILTREESAVGAENIQSSTPEVVTYVGFMQTIQENHNNIDGVLLFLDVTMYGVQPKLSGTFLKNSSLIGPA

SEQ ID NO: 44324 - protein, 85 aa, unidentified
  REGION 1..85: note = Description of Unknown:random_neg_ctrl neg_ctrl sequence
SVSKKTVLDCSSPNSNPPRYISEHGLYDMPIYKYTDYASHRSADIDKLAVSGYIIHRLYGKKFGLGRYHGDQIVGSAVTRAFVHL

SEQ ID NO: 44325 - protein, 85 aa, unidentified
  REGION 1..85: note = Description of Unknown:random_neg_ctrl neg_ctrl sequence
GANIVGIKLGTTSSTWFKVTILWVDMSLRTGRSSLAIIQNNTQRSINCVSPATPEFPIVTDLSVFEQRFSAKFAMVNKFDVANHR

SEQ ID NO: 44326 - protein, 84 aa, unidentified
  REGION 1..84: note = Description of Unknown:random_neg_ctrl neg_ctrl sequence
EPVNLAFALFQPYRISNALVVVDIFLIILSNYHFPDGQYIGKIDSNDEEQSWNFITETLSEGMKEKSFEKAKIFSASPAEKQQE

SEQ ID NO: 44327 - protein, 85 aa, unidentified
  REGION 1..85: note = Description of Unknown:random_neg_ctrl neg_ctrl sequence
NGEKKDNYPHTFDLADYVPPLVVIIQNFSGSTTSVANVEIENHDEGDAVLCAPNAKYEDVNVKESMGGLTSISKGAISNYQYMLL

SEQ ID NO: 44328 - protein, 85 aa, unidentified
  REGION 1..85: note = Description of Unknown:random_neg_ctrl neg_ctrl sequence
LGLHINLELTTEYSGIMFNLGNGITSFELSYEIQINIDPSARSKKTVLTNPLISLIPIQHYLGNISLVDPGDEDYISLEETYIIL

SEQ ID NO: 44329 - protein, 84 aa, unidentified
  REGION 1..84: note = Description of Unknown:random_neg_ctrl neg_ctrl sequence
SIIMDPLLSIPAKANPVIANDEDIYIADRPFYGNALYAEFQNAEALVKKLSNLEYHLRSLLCNGNSAFESVGKFIEDYPNRESN

SEQ ID NO: 44330 - protein, 85 aa, unidentified
  REGION 1..85: note = Description of Unknown:random_neg_ctrl neg_ctrl sequence
QNILLEAATVILFPSRRSVDKWPKGINDAFRPLILERRYGDLVDNSVIIAGKSMELVQGMKNGRSNIGKNAYVQTAKIEGARLTW

SEQ ID NO: 44331 - protein, 85 aa, unidentified
  REGION 1..85: note = Description of Unknown:random_neg_ctrl neg_ctrl sequence
KSDSPDTTASIAEKNGNLENRTVVKDKGYDSDKLGLVMTGPIDVFKMGNYNHLFVIEDQHYKITVSVTEVYEGEKFLSADLYTDS

SEQ ID NO: 44332 - protein, 85 aa, unidentified
  REGION 1..85: note = Description of Unknown:random_neg_ctrl neg_ctrl sequence
THFRYREIIQKLYTHPRQVGCYRNQCSESNILFAYEKGQNRTFQRADRYDIFPIASKNNRYEHEKNTYNIRGSVEYEQIYNNKVL

SEQ ID NO: 44333 - protein, 85 aa, unidentified
  REGION 1..85: note = Description of Unknown:random_neg_ctrl neg_ctrl sequence
AESDTVVFNSNLVEIEEQDGELLSKIIMAEDPITEEIGDATVLVLAFANKLHMIEGKRSYLISLVEKTVSSRYDTFTFKAISYSG

SEQ ID NO: 44334 - protein, 84 aa, unidentified
  REGION 1..84: note = Description of Unknown:random_neg_ctrl neg_ctrl sequence
IMGTGFGFYGSGVPASRYPIQLGIKSYIFFFVLSGMVISMKVEKYFERDEPKSLGDQFILMDRDQIGKDVADLIVLDVFKSFGR

SEQ ID NO: 44335 - protein, 85 aa, unidentified
  REGION 1..85: note = Description of Unknown:random_neg_ctrl neg_ctrl sequence
AKHKLNPCTISAPKNKGLYLSESNVESTPPRILFCESFYDVELFKEKNYIHVTGVFVNLLIWITLRDIVSLVDLAYSVNLLTKIV

SEQ ID NO: 44336 - protein, 85 aa, unidentified
  REGION 1..85: note = Description of Unknown:random_neg_ctrl neg_ctrl sequence
IGLRYDAVDEAGNVTAHYSGRFSAIVLLFHSIVRGVGYDKSFILEQISTWKDPLEFDNYANVTQDFFILTVKFETPVGERPLGKV

SEQ ID NO: 44337 - protein, 85 aa, unidentified
  REGION 1..85: note = Description of Unknown:random_neg_ctrl neg_ctrl sequence
STCSKSLIVDHMIPHKLIVNWPIWADAANPVFAPTQLMKEFNECILPRATYCVVQFNTTALAYTKETIESDAIDEVFSKKVKDHG

SEQ ID NO: 44338 - protein, 85 aa, unidentified
  REGION 1..85: note = Description of Unknown:random_neg_ctrl neg_ctrl sequence
GEYYILSLQDTSLAENPLGEISGVWMFCNLPYVALFLIRRNEYKKIKYNLEVPVLHLESEWFIRIEEINVIADLFLILFYILLVG

SEQ ID NO: 44339 - protein, 85 aa, unidentified
  REGION 1..85: note = Description of Unknown:random_neg_ctrl neg_ctrl sequence
RNAESQFGLWIFDYDNLPYVNAAWFTVNIEADFLGKPAILCNIISEAVKSFEYNGKGSNLSALKVIVNVIKPRKSKIARLLSLLC

SEQ ID NO: 44340 - protein, 85 aa, unidentified
  REGION 1..85: note = Description of Unknown:random_neg_ctrl neg_ctrl sequence
PSYTECPESGIDLAVEDDGSMPREVGVLITITKVYPPIESQQDQKHRSVKKLSDDYAGLAMMKKTAPTLALRPAYISERADTLMG

SEQ ID NO: 44341 - protein, 85 aa, unidentified
  REGION 1..85: note = Description of Unknown:random_neg_ctrl neg_ctrl sequence
SDSLAADTTGANNNSATIHYWYVVHDAGNGGRICLKIAETQLVRSCDTGTLDVYALSSAGDGAALKGFELANLQGNSIKRHYGPR

SEQ ID NO: 44342 - protein, 84 aa, unidentified
  REGION 1..84: note = Description of Unknown:random_neg_ctrl neg_ctrl sequence
ENVFIPIVRGISIMDIISYLRERLLYINWNKVKPWSAGEKNSFTTTNVNNSLYKKLVNDKSAGDLSISRYQRKQKNMLWAKRDL

SEQ ID NO: 44343 - protein, 85 aa, unidentified
  REGION 1..85: note = Description of Unknown:random_neg_ctrl neg_ctrl sequence
YIKLMAGVKVQLPIDAYDLKENQVVTYFDDTVNTDMKIADKGLRRLKKLKFLFTIKYSQTIDSLNLWTKDASEKMYVETEGNLFG

SEQ ID NO: 44344 - protein, 85 aa, unidentified
  REGION 1..85: note = Description of Unknown:random_neg_ctrl neg_ctrl sequence
YDGKSLENTLAAHPSVVGKSWEIEDGSFANCETNLVSNWQKELPPLNNFSSDPSEKPKITLIRMRDKKTFEAREGMLLIEHCGIL

SEQ ID NO: 44345 - protein, 85 aa, unidentified
  REGION 1..85: note = Description of Unknown:random_neg_ctrl neg_ctrl sequence
EFGARGIGQGIHDGEKYIEVEYVAALEIDKVMEKQKARKIRVIGGPRYVFSESKPQEYLSENILFLAFSLYSFSVGIDGIMGSKP

SEQ ID NO: 44346 - protein, 85 aa, unidentified
  REGION 1..85: note = Description of Unknown:random_neg_ctrl neg_ctrl sequence
ICEIAFKQLHSKIPATRTYDQIQSGGPGLGKLRFSAGIQERTLNAVGIKLLCTRSSEKSKVAVSWEINSTGVISKVALIIGFIID

SEQ ID NO: 44347 - protein, 85 aa, unidentified
  REGION 1..85: note = Description of Unknown:random_neg_ctrl neg_ctrl sequence
FGHEAAPYFKILKNYILHTKKIARGVDGTAVTFRQHVSPISRIDSLRIDSGAALDGPGSKGNKEALVDGTYEAFQELEKMSLAGI

SEQ ID NO: 44348 - protein, 85 aa, unidentified
  REGION 1..85: note = Description of Unknown:random_neg_ctrl neg_ctrl sequence
PNYTEGNKKSRRKPKRDVKKSASHMKDLKTIIIKVKYFYNTSETIEQYESHPEYRIVAWDADIILDGFNFTDKAVSVEGSFKYMV

SEQ ID NO: 44349 - protein, 85 aa, unidentified
  REGION 1..85: note = Description of Unknown:random_neg_ctrl neg_ctrl sequence
NFHDFLDSPVSHDIPPFHYTENVSARLLFPKWIGIKPWIKIEAFEKAEVGFTSFLGPQGKKYKLSTANAVDDGKRLNPYYAPKRY

SEQ ID NO: 44350 - protein, 85 aa, unidentified
  REGION 1..85: note = Description of Unknown:random_neg_ctrl neg_ctrl sequence
TQEMKFKYRVLRDDSAIYRRKECPGALYGDADLEALVRSVKTSLIDLWASIVDLLYLDKNGVIAGPNEVILWSMTAGDHAHYTQM

SEQ ID NO: 44351 - protein, 85 aa, unidentified
  REGION 1..85: note = Description of Unknown:random_neg_ctrl neg_ctrl sequence
EGEIIFESIKENNVIITNMIVRCVGPILVLTSAIVKVTKKCGHRKYNHEALGFIKRTHVNISLGSIIEKNAKLNRRIKHQVILEL

SEQ ID NO: 44352 - protein, 85 aa, unidentified
  REGION 1..85: note = Description of Unknown:random_neg_ctrl neg_ctrl sequence
TRVGKYSHVDKLEQRSTLLRKDATLIDELAGYYLLISALRYFFLPEEILVILENVREDSIILGKAIGSFPYNRYTLEGLGAVTSP

SEQ ID NO: 44353 - protein, 85 aa, unidentified
  REGION 1..85: note = Description of Unknown:random_neg_ctrl neg_ctrl sequence
ISNLKKYGGFSSIIFPEYKFDTLYSIIYRRTIFQEPILKCDIDMMDCVLMYLQLNAFLPFFNVLKLICLDRILNGTNIKIVDTIL

SEQ ID NO: 44354 - protein, 85 aa, unidentified
  REGION 1..85: note = Description of Unknown:random_neg_ctrl neg_ctrl sequence
AVIIIVKLDYISVFATRLLPAYGYANSSQIVLKEIQPRIVPCTTGAFPVACHPRTSKVVAINANSRKKHLDSSCRIEQVVINRNT

SEQ ID NO: 44355 - protein, 84 aa, unidentified
  REGION 1..84: note = Description of Unknown:random_neg_ctrl neg_ctrl sequence
MAVPFGASLVIPLGELDLDLAKVKKAKDATKYHFIETETATIMKYEVTFRKLINPKIDDANMVDIAPMIVHLQTIYRGKKIMQR

SEQ ID NO: 44356 - protein, 85 aa, unidentified
  REGION 1..85: note = Description of Unknown:random_neg_ctrl neg_ctrl sequence
FRSKPMIALVKYMLSAVAIARKKIPAFALTDEILVITSRSPYLEAVELISKAEEITNMSALWDLRICAVLAIRIIAEKRKIEYIF

SEQ ID NO: 44357 - protein, 85 aa, unidentified
  REGION 1..85: note = Description of Unknown:random_neg_ctrl neg_ctrl sequence
ERGFEAIFNTAIHPRTPRGTMLLGPKIPPKPPTELIIRRYGPGQTINVSLLIRKNANHVYVAYIDVEPFNLDDNVMTSLGWFTPF

SEQ ID NO: 44358 - protein, 85 aa, unidentified
  REGION 1..85: note = Description of Unknown:random_neg_ctrl neg_ctrl sequence
EERLLDGNLNKEFRIPGSFWPIYSLFPNHMTGNDLDPHNKSITQIDFENLFLSKFNIASELISNQGKYIGEMIEMFILILYKDYG

SEQ ID NO: 44359 - protein, 85 aa, unidentified
  REGION 1..85: note = Description of Unknown:random_neg_ctrl neg_ctrl sequence
LGLSDHPPDGHEAGRTLDLVDEQITSSLAKGNLNMAIKFHLGYFYPMFENYACSRPRDSALVIIERSKRVVGESSDWKSKVYILN

SEQ ID NO: 44360 - protein, 85 aa, unidentified
  REGION 1..85: note = Description of Unknown:random_neg_ctrl neg_ctrl sequence
ETWCRSPRNEIVHLCNAEEKAIILEVALSLSAVFGKKGKAKIIEWGYPYGLKALGASVRIIKADNVALLAVNVTKLQRKVHLLAN

SEQ ID NO: 44361 - protein, 85 aa, unidentified
  REGION 1..85: note = Description of Unknown:random_neg_ctrl neg_ctrl sequence
NSRVLMELENLGLNDNMAEMTTESRSNRNIRVAYVLSYIILEDLDFAIFSVDNYVVYKLYSKYSDGGQIEIGLDPTNAQSLVSSF

SEQ ID NO: 44362 - protein, 85 aa, unidentified
  REGION 1..85: note = Description of Unknown:random_neg_ctrl neg_ctrl sequence
KYNKPGLHDKRSALFNTDVDEYVNMSVWKTQKNDTLDKLTPGELVDTTGIFDVYTNVAYEHYGNEASEEEIIKAKIFSKGDGDVL

SEQ ID NO: 44363 - protein, 85 aa, unidentified
  REGION 1..85: note = Description of Unknown:random_neg_ctrl neg_ctrl sequence
LYFWTNVFQSSPLNNTEKKSGNAIDGDYLYANSYSACTIITINEARNLYPFETELEVNNFFIEESLTTRFKFMLRFALLDDMFEA

SEQ ID NO: 44364 - protein, 85 aa, unidentified
  REGION 1..85: note = Description of Unknown:random_neg_ctrl neg_ctrl sequence
LERKSENDQSVSGDQIPEVFTNFYMNNKYLVDNDLDMIGEYSLFKEIFLLIKNYLIGSVVAVSGRFKVVTYRTELGNFCIIINHV

SEQ ID NO: 44365 - protein, 84 aa, unidentified
  REGION 1..84: note = Description of Unknown:random_neg_ctrl neg_ctrl sequence
VGEYHPTHISKASPKKNVMRVSLLKPQIKGEIGSKVFKLYIYAYIMICRLISNWQNSLAFIGLLIAIGIVRVASPNKYNEWSIW

SEQ ID NO: 44366 - protein, 85 aa, unidentified
  REGION 1..85: note = Description of Unknown:random_neg_ctrl neg_ctrl sequence
LVAEIKYENCDTAPESGLIRYVAIRGKGCSKSRQGQYESVEGYYILFLILFIYANEELKDWVEMSQKDEVGCSFNLVLKDEKVKG

SEQ ID NO: 44367 - protein, 85 aa, unidentified
  REGION 1..85: note = Description of Unknown:random_neg_ctrl neg_ctrl sequence
IIKFLNKIYSFNYSDSKIKHLDLSINLKCIVTRQPLGPPDFEPIIIDIEAGFDPTAYQRVKDPAERIAGTNSQTKFLWEQNSLID

SEQ ID NO: 44368 - protein, 85 aa, unidentified
  REGION 1..85: note = Description of Unknown:random_neg_ctrl neg_ctrl sequence
QAIYIHITKSEDGFTVKEKAAEIAYSASTPRAFLDMDTEYGILFSKDSGTHSILVLERKVTLYFSPVGPCHATRFLLMNPKLKSS

SEQ ID NO: 44369 - protein, 85 aa, unidentified
  REGION 1..85: note = Description of Unknown:random_neg_ctrl neg_ctrl sequence
ELTIAEAPTTIIMSDIYEEIQNERKVKWIGKGFSRSTRDSIYLVGSPIVGKLLIPRLKYRAARIPKDHLEFVRGASLIGFLEETV

SEQ ID NO: 44370 - protein, 85 aa, unidentified
  REGION 1..85: note = Description of Unknown:random_neg_ctrl neg_ctrl sequence
LLDPDRIDAVYELCYLMPHVPYVNAERSSPICTNMTGVAPSEFYLFDFRLRKSFLVCVFPTTARVIDFPELKAHVSLEWICLGEL

SEQ ID NO: 44371 - protein, 85 aa, unidentified
  REGION 1..85: note = Description of Unknown:random_neg_ctrl neg_ctrl sequence
FPLLFDKLQRSIEGRYMYEDSKKLCVNSEAILLTGSFDELKLAISQVVSADDNDAQPTEFGCVAPTRLKTTAGEEKAPSVYHKSV

SEQ ID NO: 44372 - protein, 84 aa, unidentified
  REGION 1..84: note = Description of Unknown:random_neg_ctrl neg_ctrl sequence
VCFFRLTSVIVTVCDQYFYHSLELFAYGLIIRKLLNKFGNPKLSSFLETYRNLDYKDPKRGIGLRGFEVFILGIMMVPGTTEFD

SEQ ID NO: 44373 - protein, 85 aa, unidentified
  REGION 1..85: note = Description of Unknown:random_neg_ctrl neg_ctrl sequence
GDPAAFHSRTKVKLYVSELNKSDQDVPNVADGEVAAHRFLFLLYLEHRSNKGSLIMSIPMFWQLIGVIKLAPSTNNICLVRLKTD

SEQ ID NO: 44374 - protein, 85 aa, unidentified
  REGION 1..85: note = Description of Unknown:random_neg_ctrl neg_ctrl sequence
TVYVQSIIPCHKMVVVRPELGFAIYTGNSDNCACFDKACEFDKKCERECLPYIPDMWRGFAIIIRIQASVLQIMSSPKNTSFHFG

SEQ ID NO: 44375 - protein, 85 aa, unidentified
  REGION 1..85: note = Description of Unknown:random_neg_ctrl neg_ctrl sequence
PWPSQVILDGWSSLQGKNYKKGIVVDCAISDGNVSIGIHGANAYVDVLAHGLCDRLLLTIFVQGNFSTIQGVAIETEVFFLRLNE

SEQ ID NO: 44376 - protein, 85 aa, unidentified
  REGION 1..85: note = Description of Unknown:random_neg_ctrl neg_ctrl sequence
EMAYVNQEMLVADPFQILVLEDDHLLGMVIILSKGDSLLSPRCWVKYRTMLALRNEYREEMPFYFALKESIEVSDPLEDPREFVN

SEQ ID NO: 44377 - protein, 84 aa, unidentified
  REGION 1..84: note = Description of Unknown:random_neg_ctrl neg_ctrl sequence
LMHTYIVTVDYEFEAKSYTSDIELFIKFWSGQINSKKLAVYYLPIRVAGEGDRVHPDSIMFQFSGREATLESGCLIAEQLLYKV

SEQ ID NO: 44378 - protein, 85 aa, unidentified
  REGION 1..85: note = Description of Unknown:random_neg_ctrl neg_ctrl sequence
IWEFVKPPEWLVRFAPTFINRLTCDGVRGNASGKILQVNSVQLGISGSVIDDFPEFGYNKCTGIEFTVLFTDFGGNEEADADIVL

SEQ ID NO: 44379 - protein, 85 aa, unidentified
  REGION 1..85: note = Description of Unknown:random_neg_ctrl neg_ctrl sequence
VKVASNLNKKTDLIFNSYAGGTGSYVKNVIANIALNGASKNHTPRSIYAYAMLKNENGSSDSKESAGVDFGVWQIACKTHATIER

SEQ ID NO: 44380 - protein, 85 aa, unidentified
  REGION 1..85: note = Description of Unknown:random_neg_ctrl neg_ctrl sequence
LYPGGAAAVGFVFESSDPFTVCLANEESEGIGSEENVELPRSNVAALGCRNKDAISMLPEKLVSQIKVIGVVKYKIVRQENKSIK

SEQ ID NO: 44381 - protein, 85 aa, unidentified
  REGION 1..85: note = Description of Unknown:random_neg_ctrl neg_ctrl sequence
NFKYRMAAFMLLASFTGLVSYVPVFQYIRGAVRVYYLRLGTSFLNMSCLSTPKFRRHIEALDMQDVDNIVFLVYELPKYIIVASA

SEQ ID NO: 44382 - protein, 85 aa, unidentified
  REGION 1..85: note = Description of Unknown:random_neg_ctrl neg_ctrl sequence
KIHADVPLEMKGPKNIFIDDVSKIPLYKGIALDVVFSKTDSGQNEITALLIPINQQVGKATALDGEIAFILRLGTTVCSEAYFST

SEQ ID NO: 44383 - protein, 85 aa, unidentified
  REGION 1..85: note = Description of Unknown:random_neg_ctrl neg_ctrl sequence
VIYRTVRSEPNIIICRKPSAVPSYISMDKVPDRRYAESFGILGTRAVERDVELPVKDDAQPALVEPALDWIITKIAYRGVSLGSP

SEQ ID NO: 44384 - protein, 85 aa, unidentified
  REGION 1..85: note = Description of Unknown:random_neg_ctrl neg_ctrl sequence
SNTSLLIEENISRTMPKFRPENPYGHYLRADKAKRRLACNIAPMQSGPLLNYGPKEIDHIEEVVSELISEIIWDVIVSASGVEEE

SEQ ID NO: 44385 - protein, 85 aa, unidentified
  REGION 1..85: note = Description of Unknown:random_neg_ctrl neg_ctrl sequence
FQFLWRDLEFVGIMRSRRQYKPFNIMTKKTGQVQWIAIDAGCYMGGLFFEPQINQKRLGGEYELINTFTAKIVISNFIMLPSLKV

SEQ ID NO: 44386 - protein, 84 aa, unidentified
  REGION 1..84: note = Description of Unknown:random_neg_ctrl neg_ctrl sequence
ALLSLPVNQLGLDAIRAERVVLLDTLNSTEEGEQDSHEGIPKILQITLLIGYRSSIMLYVESMTSNTTLCPANSTIMLVPIEGI

SEQ ID NO: 44387 - protein, 85 aa, unidentified
  REGION 1..85: note = Description of Unknown:random_neg_ctrl neg_ctrl sequence
GISTKGHFTTLRKTGSREMATKVGIYGYNGTFPRITGFTGEMYDWNPVPMTELDPFKTRLVQSSEKNPTESFVFGWVEDRSYPCK

SEQ ID NO: 44388 - protein, 85 aa, unidentified
  REGION 1..85: note = Description of Unknown:random_neg_ctrl neg_ctrl sequence
LDKEADIYNVGRALDFLLRPALIYYFIRAYILTSVNRSYRPQLTDVYDYLERSILKILPDGFNIFKLSCLILIDNTLRDAHIHCI

SEQ ID NO: 44389 - protein, 85 aa, unidentified
  REGION 1..85: note = Description of Unknown:random_neg_ctrl neg_ctrl sequence
AMSSGTRVNSFELLLFEGDKLQVRASTFKANYEIVTRWEPDILHVTKCEIELPQEDIYSLPGLFFIHVRGHKPVLSPVTTKGIWP

SEQ ID NO: 44390 - protein, 85 aa, unidentified
  REGION 1..85: note = Description of Unknown:random_neg_ctrl neg_ctrl sequence
VDFEMVPHAGTCIPLRYYVRIKGGEERRSNIEYTHTTTGDWGRKLKMYFLTFLTFAKSILLPLSAQRGQLHADNFKHASLAEMYH

SEQ ID NO: 44391 - protein, 85 aa, unidentified
  REGION 1..85: note = Description of Unknown:random_neg_ctrl neg_ctrl sequence
TVHDILLRVILNGNLIKMDGISLTPICYYWDPYDKVYTPFVAVNTAEDPDYVDILQCIENWYGLNKFGIKARYVTERYTSAMTSK

SEQ ID NO: 44392 - protein, 85 aa, unidentified
  REGION 1..85: note = Description of Unknown:random_neg_ctrl neg_ctrl sequence
LKPWIQYFIGQYLLYSIVFVIILRMPKPTATSILTLIESSYGYAFLNRHYLSGLNKVPSVYLKNTPGVYFLGANGTKHASGANAS

SEQ ID NO: 44393 - protein, 85 aa, unidentified
  REGION 1..85: note = Description of Unknown:random_neg_ctrl neg_ctrl sequence
TLLPEPIETFKDKKAQLTKIPAIPAFRLIDDIGTEEIASVEMEVPIYNSGKRGIANYEVARDTAQCELENYQKFLSTQNLGGSKN

SEQ ID NO: 44394 - protein, 85 aa, unidentified
  REGION 1..85: note = Description of Unknown:random_neg_ctrl neg_ctrl sequence
RYTNFRVACQTEIEVQYAESVIIGNKNTGSSVAAKPIVIFGLEGNLLLNTDSSDVGARSIINSLDAFEIPPRVVLLSSYSIADLI

SEQ ID NO: 44395 - protein, 84 aa, unidentified
  REGION 1..84: note = Description of Unknown:random_neg_ctrl neg_ctrl sequence
NRECIKEAKILDNKINIYAVPDTLEKIYAFHIPDSLQTDLTVLPQLRTNLRIDTKLLNALKIALRDRYWRDEAAQYIEATKFDR

SEQ ID NO: 44396 - protein, 85 aa, unidentified
  REGION 1..85: note = Description of Unknown:random_neg_ctrl neg_ctrl sequence
SDGRVNFDVAQLSDNKITIQGVKIAAILKSFPPNSDLLVIPDDISYNTPETEKPKFKSNNEAKGTNYLAKDVPPFTDMKVEEMHV

SEQ ID NO: 44397 - protein, 84 aa, unidentified
  REGION 1..84: note = Description of Unknown:random_neg_ctrl neg_ctrl sequence
DNKVTMFKKSVLNLLIYSPHGMVLYKLINLLLDTDQSKAVEIVQVVTIVKVLEREDILHKYIYKSAFYPSVPSIDIKGKDVVLY

SEQ ID NO: 44398 - protein, 85 aa, unidentified
  REGION 1..85: note = Description of Unknown:random_neg_ctrl neg_ctrl sequence
LTKKPTEEEIPAPRMEARIAEAEGSGKGDVKAVAENLSPTFSEGGIPYSSAIDCRDECLIVMISTGIPKGNKITVKLTQVNNSEF

SEQ ID NO: 44399 - protein, 84 aa, unidentified
  REGION 1..84: note = Description of Unknown:random_neg_ctrl neg_ctrl sequence
LWESEGVLKAISYKGSFANVVEKANNGLNLNETKVATGVGAFFTPAVKQNQLFALQYQVDGPQSLVCYYPFKAEFKLYWLSKFL

SEQ ID NO: 44400 - protein, 85 aa, unidentified
  REGION 1..85: note = Description of Unknown:random_neg_ctrl neg_ctrl sequence
PYIISIMSWNIFIDPFAFANYIVEDDLAKLEAVDKTFSPVGYELQGVLRKRVGNDQALAREKYRILTFLPTSSSPKPCKIAVIQI

SEQ ID NO: 44401 - protein, 85 aa, unidentified
  REGION 1..85: note = Description of Unknown:random_neg_ctrl neg_ctrl sequence
ALYDLVSFFYNLRASANAPLWVEKSAIGILGMKLECPFLLPNFSILDFTVVDTREQPLSERLIPPSVNNPAFIVNCEEYKKDPND

SEQ ID NO: 44402 - protein, 85 aa, unidentified
  REGION 1..85: note = Description of Unknown:random_neg_ctrl neg_ctrl sequence
GAWQVKILISPDYVHIAAADILLIQSLHYDILANFNNALQKNVKHAGPDRIPAKHSHLNGQYVLDPVKQSETVRPRPLFVQTIDP

SEQ ID NO: 44403 - protein, 85 aa, unidentified
  REGION 1..85: note = Description of Unknown:random_neg_ctrl neg_ctrl sequence
ALFVLGYAIYTKYQALGELNKAKIALTEVGSLKPDNYDDGISPAKGINTASKLIGLFVLQPLGEYKMVERTVKVVPMKDIFIKRT

SEQ ID NO: 44404 - protein, 85 aa, unidentified
  REGION 1..85: note = Description of Unknown:random_neg_ctrl neg_ctrl sequence
STQLNKVDKSHSEIGCEREAHQFKPMVSILIIFVATTTGALPPNVPITFLTMGVVVYLRPLITHAKLSRPFQLLLEKFIAPDKMV

SEQ ID NO: 44405 - protein, 85 aa, unidentified
  REGION 1..85: note = Description of Unknown:random_neg_ctrl neg_ctrl sequence
DDGYRSKEWNVDNLAKWVGLEPRSKKERVGPDFIGKKRCLQLSVKDTRGDAMPGFYLTTTTIKHWDSKEQAKENPLSEAQSDLRI

SEQ ID NO: 44406 - protein, 85 aa, unidentified
  REGION 1..85: note = Description of Unknown:random_neg_ctrl neg_ctrl sequence
GTNENLQLIIKLDAGYCNIIYAPSTDRAANRGGGSKDKTAFWDRSIEDFLGVNVLLKEPVLGLSEIVSILSSDQNVVEVAVLNAF

SEQ ID NO: 44407 - protein, 85 aa, unidentified
  REGION 1..85: note = Description of Unknown:random_neg_ctrl neg_ctrl sequence
STKSTLFLALSLILKGFNDGIEVLINNVLGEANKVTTCEVVHLIIIISELIEVARRPGIWILNFFGVALKNILILISLSSFESKE

SEQ ID NO: 44408 - protein, 85 aa, unidentified
  REGION 1..85: note = Description of Unknown:random_neg_ctrl neg_ctrl sequence
MEVQVFPNIPMHKKKMKFYTSYIELRMFGKPENNTYKTVTWQIPVFRNISDCRLMGKPSARVIAVFQYRNAADAGGIRLYVEIKK

SEQ ID NO: 44409 - protein, 85 aa, unidentified
  REGION 1..85: note = Description of Unknown:random_neg_ctrl neg_ctrl sequence
LSDVKALGLIPVDEPYNLNKRYCTLLNYDNIYLCCTKLFNYRLQLNKRELYELVYMNCNKKLLTVQAQLCYNETKLLNHIPAEIT

SEQ ID NO: 44410 - protein, 85 aa, unidentified
  REGION 1..85: note = Description of Unknown:random_neg_ctrl neg_ctrl sequence
AKALRKISSRLDFHPPSVGFVGVFKNFYERLDYKFILPTPIPFISTAKLMYDVPDEVNEDLINNLVVLRKVAKMYLSWIKETKGQ

SEQ ID NO: 44411 - protein, 85 aa, unidentified
  REGION 1..85: note = Description of Unknown:random_neg_ctrl neg_ctrl sequence
KLFFIHNSVNFYANGLKDVPYGSPNAESRRSKVAEYQPKLVVDKLLAAHYKSRELSGQFMISHHELVMIQCGNTKPLDRFNYNSP

SEQ ID NO: 44412 - protein, 85 aa, unidentified
  REGION 1..85: note = Description of Unknown:random_neg_ctrl neg_ctrl sequence
MFKLRASGSNLELVDRGEEHRAESLLKQLLMLNDYYTARDPILLKCKYFKCKEVVNFGSCSLWSLVIDEFTLFDTKMFLRPLQLS

SEQ ID NO: 44413 - protein, 85 aa, unidentified
  REGION 1..85: note = Description of Unknown:random_neg_ctrl neg_ctrl sequence
LEEDQLVTTVKAKIFKGFGTAMPVTFLESASNKYIRQSVALGKQNIDKDKLMEVVLKKFMSINKTEVTFCRMEKTILDSECSSQD

SEQ ID NO: 44414 - protein, 85 aa, unidentified
  REGION 1..85: note = Description of Unknown:random_neg_ctrl neg_ctrl sequence
WKKALEISNLKGLLKDLVPYYGEQADKYTIGIYVQTTIISSYVSESSTIPNKIPETVFPFVNPQVIIQIEHRIEAIEIQPDLLDY

SEQ ID NO: 44415 - protein, 85 aa, unidentified
  REGION 1..85: note = Description of Unknown:random_neg_ctrl neg_ctrl sequence
NLRGYELKDNTIQLEYSCGAKEDSVVCIVIHFFTQIGPDILLVNFISKVELYNAIQSSSVDNQYIYFLPYEPPIQQLFDFFHRAE

SEQ ID NO: 44416 - protein, 85 aa, unidentified
  REGION 1..85: note = Description of Unknown:random_neg_ctrl neg_ctrl sequence
SGRLRLLPQLFSNGGTRGKWVALKLKMAQAPYYSILSEDNDKQIFEHYSLYALWAQLASRDFTKSSVIKYFSINEVGDRAVQGFA

SEQ ID NO: 44417 - protein, 85 aa, unidentified
  REGION 1..85: note = Description of Unknown:random_neg_ctrl neg_ctrl sequence
TGLIKRRPSFLIPKPEAGGRLEMRAKIIASTDKAIFRINSVLANDIIFGAGGVASFQTTWGTNVTADLGYMGDLMDIRCEATNQK

SEQ ID NO: 44418 - protein, 85 aa, unidentified
  REGION 1..85: note = Description of Unknown:random_neg_ctrl neg_ctrl sequence
LVEGICKNVLVLKFLACVYYNMDCIPVSGNQKKTTTVEKIFYRDHLDDEVVVGGFVALVEFIYLGTKKTYRDFICKKVFGNALKV

SEQ ID NO: 44419 - protein, 85 aa, unidentified
  REGION 1..85: note = Description of Unknown:random_neg_ctrl neg_ctrl sequence
MISFFLPMLASRLATVKGHYIVRASQIPLRINKIELTMVGRTIAYDSFSYEKFRENPRMDNVICESSYPVKFKIRGANPINVLRE

SEQ ID NO: 44420 - protein, 85 aa, unidentified
  REGION 1..85: note = Description of Unknown:random_neg_ctrl neg_ctrl sequence
SEPRDTSKSMGNFGNIQPYCKQLIFLDFSLAILIVKSLSTSLETAVAGSGRIAMLSHTACSYICHILMFKAGRDASSRWKNCVLV

SEQ ID NO: 44421 - protein, 84 aa, unidentified
  REGION 1..84: note = Description of Unknown:random_neg_ctrl neg_ctrl sequence
IVTIVLPAVGEKLQRKAASASKHPEGKREGALSNEKTGQAEVLWIRNFRCKLNKDVAYLLLGYLRKSFYILFNEQEQELKFFFS

SEQ ID NO: 44422 - protein, 85 aa, unidentified
  REGION 1..85: note = Description of Unknown:random_neg_ctrl neg_ctrl sequence
VMISHHITAFYMEFFIPKKEDRDTEEEISVEIGVPPDDGYRLPKLRMKPDYNPASDDIHLAREAGAITDMTGDSVYSREYYSLIE

SEQ ID NO: 44423 - protein, 85 aa, unidentified
  REGION 1..85: note = Description of Unknown:random_neg_ctrl neg_ctrl sequence
SVISIDYAWELGVFILTAKFDTRLDIDDQIAFSTSTGRSTFITIRAKTYPLVTVVKTIVNESHAPYVTMSPVQTLKEGRSGSKIF

SEQ ID NO: 44424 - protein, 85 aa, unidentified
  REGION 1..85: note = Description of Unknown:random_neg_ctrl neg_ctrl sequence
ANVHFTHNNDASTAYGWRGRYTVRRPLSYGEIRSADYLFPEKGIRNTCGSLSNKKYDLILHKITRIGTVLDSYAEVHILAGATEK

SEQ ID NO: 44425 - protein, 85 aa, unidentified
  REGION 1..85: note = Description of Unknown:random_neg_ctrl neg_ctrl sequence
WPAEPWKRPDESFEIEDNYIESVFDSVLGFYFLSMQGERRPDDTEWRYLNIKGVSAKSISEKTTRSLKELLQGVKAPQRENRKCE

SEQ ID NO: 44426 - protein, 85 aa, unidentified
  REGION 1..85: note = Description of Unknown:random_neg_ctrl neg_ctrl sequence
AHDTVSLGLPSLDLQYHVENTFLKTTYYGDENAGETQNPGTVPIHFLRASNLASIVEVIVGHLDLPESEYPNGGNHLELSYSACL

SEQ ID NO: 44427 - protein, 85 aa, unidentified
  REGION 1..85: note = Description of Unknown:random_neg_ctrl neg_ctrl sequence
EVGIGNLEAMKGLEKTVMIIQPKIEEPGWRRLMHMMDLGYLPVGVVGSRKLTNDCVLGIRTIDDELVLSWMITEFGARDLSYSLT

SEQ ID NO: 44428 - protein, 84 aa, unidentified
  REGION 1..84: note = Description of Unknown:random_neg_ctrl neg_ctrl sequence
NYGNDDFALFTILSPNSLTPDTLQERLGPVNGWTDAPKYDEYIINELKSLLTMSPATVPQAYLTKGTTTLPVLGISASFKMQEV

SEQ ID NO: 44429 - protein, 85 aa, unidentified
  REGION 1..85: note = Description of Unknown:random_neg_ctrl neg_ctrl sequence
YACLTDREQHDIRAKFLSVTYPKIKYIQILKLHELKHELGIGLGIPWILDFIIGSLDTHLLIQFFKLDYAVLVKIAGPYELREEP

SEQ ID NO: 44430 - protein, 85 aa, unidentified
  REGION 1..85: note = Description of Unknown:random_neg_ctrl neg_ctrl sequence
KGNRAATSDKELYQHGESLPILVTVLEYNEEFAEVKLVTKTVDDGFVHPYFPYKESYVTLETAYARLRAANYDVEWRRERIINSL

SEQ ID NO: 44431 - protein, 84 aa, unidentified
  REGION 1..84: note = Description of Unknown:random_neg_ctrl neg_ctrl sequence
IYHRDLISAFFFAGVFGLFRRNTQSDAVHDMKVLYNTSGDPVVNIGDESRLYARINESIANIMSTVSTAKHLESTTVGVSSNTG

SEQ ID NO: 44432 - protein, 85 aa, unidentified
  REGION 1..85: note = Description of Unknown:random_neg_ctrl neg_ctrl sequence
DKSPPLLLLSESVEELYGGDIHSLGETIAISMKYLTTTFLMIECLGVYQIRKGTMTQDNDAGWHKAKSFEVEEPLMYKTQLLDAS

SEQ ID NO: 44433 - protein, 85 aa, unidentified
  REGION 1..85: note = Description of Unknown:random_neg_ctrl neg_ctrl sequence
TIAGNGPALENETIVRFFAPFTVKIDGHFTENFDSIHEPAIEYKKLWLNKVNLRQLTPKGTDPEDGTGRASNKLIACEFFIRETL

SEQ ID NO: 44434 - protein, 85 aa, unidentified
  REGION 1..85: note = Description of Unknown:random_neg_ctrl neg_ctrl sequence
LKLTVLYDVKSVQTFNETLLLASNTKLKLPITASEFELHNSYAPFTQTACESLQAFDLIFYMSGVGYLHVMADAAITIQETQYKL

SEQ ID NO: 44435 - protein, 85 aa, unidentified
  REGION 1..85: note = Description of Unknown:random_neg_ctrl neg_ctrl sequence
DINNVTYIINPGRMASPTLYASNGKESLLPVIGCPQKKMEVIDIDPISGTYLNVTNGQISQKQTAQLNEYYSTTTNEFSKYGRVQ

SEQ ID NO: 44436 - protein, 85 aa, unidentified
  REGION 1..85: note = Description of Unknown:random_neg_ctrl neg_ctrl sequence
VEKTVSMKTILNANEKIGDRPLGDALFNILAILEMTFDLRRDKKVLHFFLIPSMTRKLPLWGSEHNAFYINSKDVHTFMWRFVMS

SEQ ID NO: 44437 - protein, 85 aa, unidentified
  REGION 1..85: note = Description of Unknown:random_neg_ctrl neg_ctrl sequence
EKSALLRTWDNMPNRLVKSANNRPAKYSTTGSSGSTRPETDSVYLVVLRQNVKLITNDVTFMIGFEIIYIMFGFVTKREQGMRML

SEQ ID NO: 44438 - protein, 85 aa, unidentified
  REGION 1..85: note = Description of Unknown:random_neg_ctrl neg_ctrl sequence
DKLVVVQYPESMLNSKSDFKDDVTNRGLFFLLSPEVDNIMIPLLGCSGEFLFSKVTKVNYRSIGTQTTQINNMSSIETIFPIVFN

SEQ ID NO: 44439 - protein, 85 aa, unidentified
  REGION 1..85: note = Description of Unknown:random_neg_ctrl neg_ctrl sequence
YSETCLPAPYKAEDALQVEDFPADAFIEDETPDLKVLRWETIEFYSNGCNLLIQEISLNNFYFEQKTEPTVIGKFLATIASYPVA

SEQ ID NO: 44440 - protein, 85 aa, unidentified
  REGION 1..85: note = Description of Unknown:random_neg_ctrl neg_ctrl sequence
QRIINLGFKIKNGWRRLVYMKLYFAEYPIDKVLAEEWLPKDKEALWNGRYIINPLMGSAGKELNIHYGLAEIRCYTAGSAVYKWG

SEQ ID NO: 44441 - protein, 85 aa, unidentified
  REGION 1..85: note = Description of Unknown:random_neg_ctrl neg_ctrl sequence
SGIKEDEIDVSLNSIGIFFGVRTITKSCREDNLYINAVEIIGMSMISMPVTDLRCITQWSRHYRYIIYPALESSQRLMDKAGAQI

SEQ ID NO: 44442 - protein, 85 aa, unidentified
  REGION 1..85: note = Description of Unknown:random_neg_ctrl neg_ctrl sequence
CPTINEVTKKEMLEKCKSLDTGIGLTIDRNQTAMTYDEHNANVQTGVSGKMKNKIASGEQWGADTLQNFFPTIRPSTELFHSFEK

SEQ ID NO: 44443 - protein, 84 aa, unidentified
  REGION 1..84: note = Description of Unknown:random_neg_ctrl neg_ctrl sequence
TPPDIRIEMQDSPADVPSDKLAGRTPKTIFKPTSSTFSGRDGANNWQTCSTCLIIMFTREAVYKLLQIELPMIRDYLILAQKEK

SEQ ID NO: 44444 - protein, 85 aa, unidentified
  REGION 1..85: note = Description of Unknown:random_neg_ctrl neg_ctrl sequence
FTRVSDEYDSWSAFGDYFHWNIGQPTDVMYLNFHPADNPWGSDTKLRRRASDGLYAPFSDSTLSPCLMLLTTSSKKAIAYKCQIS

SEQ ID NO: 44445 - protein, 85 aa, unidentified
  REGION 1..85: note = Description of Unknown:random_neg_ctrl neg_ctrl sequence
EKDPSNKGGKDIANHYFLKFINEKTQLGKPTACTQSEQNKASFPLPLPSNVVGFNIFDSNDRVWRDYHLYFLTHKNVLKAQFEDD

SEQ ID NO: 44446 - protein, 85 aa, unidentified
  REGION 1..85: note = Description of Unknown:random_neg_ctrl neg_ctrl sequence
KVAETSNFKKVVVEPDVTACILQGLEGDGMNKGAVHKVFFKIDAEDEGPNKPPTATDLGTYLGNILYVEGIIDLKRGKINPAIPS

SEQ ID NO: 44447 - protein, 85 aa, unidentified
  REGION 1..85: note = Description of Unknown:random_neg_ctrl neg_ctrl sequence
NTIPMKDRAYRDPFSFKKFDTQSADELTVNIWNFIPVAKPPADKVSTLSYLDAVATSVSLIINGDYADYESIYSILEFMTWKFTF

SEQ ID NO: 44448 - protein, 85 aa, unidentified
  REGION 1..85: note = Description of Unknown:random_neg_ctrl neg_ctrl sequence
YLLAADELIEKNPMDAQYISYSFKYDRDITGRANKSEDDWHVLDYMKFVLGLLMKMVDKRKKSQAMLVQTKNSSLSESHVTQEQD

SEQ ID NO: 44449 - protein, 85 aa, unidentified
  REGION 1..85: note = Description of Unknown:random_neg_ctrl neg_ctrl sequence
ILQRCGAVLNITDIIAAYYLTYEYQADGRAGVDGKLKPRIQGIAFSNIPKAFLKFYQFSWPFGNLFDDLGLCSKKPEGDELFMMF

SEQ ID NO: 44450 - protein, 85 aa, unidentified
  REGION 1..85: note = Description of Unknown:random_neg_ctrl neg_ctrl sequence
KDQIHSGLDIDIHAKSIVEVYIQRYISLIIPIKYNRKEGPTAIVDSLLGHFDSTNNLRCVTLENNRLTQVEVRPEHRAKKFWKES

SEQ ID NO: 44451 - protein, 85 aa, unidentified
  REGION 1..85: note = Description of Unknown:random_neg_ctrl neg_ctrl sequence
KGQINKNLSNSVAEDLLIGIYIIKYEKLIKFYETGMDYYVVDTNNRDLTYNGTIGITRLPMDELTHVKTPFSNGEWVDEVSANLV

SEQ ID NO: 44452 - protein, 85 aa, unidentified
  REGION 1..85: note = Description of Unknown:random_neg_ctrl neg_ctrl sequence
QDAGNIVFNEKADHIFLPQWGIRDRRTVTVDFTSELNINVNLAAIAPNITIVSAILLFRDAELLLTTVTIKAAEFFSASDEKIDA

SEQ ID NO: 44453 - protein, 85 aa, unidentified
  REGION 1..85: note = Description of Unknown:random_neg_ctrl neg_ctrl sequence
PNELTKIPKVDVIVSLNMLYTASPDGEAGGKYQINIVEGPQLKMRYWNKVAISYELDKNKDMAFKEHVLKHFYMTGNDIGLESAS

SEQ ID NO: 44454 - protein, 85 aa, unidentified
  REGION 1..85: note = Description of Unknown:random_neg_ctrl neg_ctrl sequence
SAKGIICPFDTSIGMSIGYRSSPYYKWVYQVEPDLATNDNYTLDTTKQLTYGEYDSETRPNEQPNPDKVDKDFPIRSLSWLTGVR

SEQ ID NO: 44455 - protein, 85 aa, unidentified
  REGION 1..85: note = Description of Unknown:random_neg_ctrl neg_ctrl sequence
LMQSLPRKMSDIKKSNAASQKELIVTEIYARNSEPGLRLTLLRSNFAWQKGPYRAMERYPAPVKYGFENSKQWSRFNAKISFVMK

SEQ ID NO: 44456 - protein, 85 aa, unidentified
  REGION 1..85: note = Description of Unknown:random_neg_ctrl neg_ctrl sequence
VEESFEKTLKAEFKFDLSDTQSGENYLAWDLIYLPFFNEISENLRPFIAEVDQEARVDDKFYDFRITALLHSLLYTVGVLGLWPS

SEQ ID NO: 44457 - protein, 85 aa, unidentified
  REGION 1..85: note = Description of Unknown:random_neg_ctrl neg_ctrl sequence
PYNFVHTLEEPTKFNAGEAFKRGGSGIMMNMKTFNQDNVFNHLNYYQGVQHLQAGKFVPLFYVLPLQITKEDSIVKGLLITLFSI

SEQ ID NO: 44458 - protein, 85 aa, unidentified
  REGION 1..85: note = Description of Unknown:random_neg_ctrl neg_ctrl sequence
TTLQQQATIARETDEPDKQEVVKMIKHRHKPVYSHIEAAVAKLAIAYAVPLQKKVSPQTVYRSMYWVNYIEHKNPEPGLSGAILS

SEQ ID NO: 44459 - protein, 85 aa, unidentified
  REGION 1..85: note = Description of Unknown:random_neg_ctrl neg_ctrl sequence
GGLVIYSWWGVITKRYINSSFTPIEYMLFKPSLIKLCVELDQNQFAYTTIVPFSKALKAVAWFIPKIQTHRLDDPQGDELEARYI

SEQ ID NO: 44460 - protein, 84 aa, unidentified
  REGION 1..84: note = Description of Unknown:random_neg_ctrl neg_ctrl sequence
EKSGKLLSKTDIPVRICTAIEFSYPPDDTRIVFKILFSRVAGSWSVIADYINTVCKTPFISERVAVRLTDRNYKNQIIEGVGNT

SEQ ID NO: 44461 - protein, 85 aa, unidentified
  REGION 1..85: note = Description of Unknown:random_neg_ctrl neg_ctrl sequence
NNSGVLYLSASVKADILGTEEQNAGITKQEKETNRESSLSKYFCLLVLGVKEPPLPIISKNLLGLKFAPLAIESVRCKSSFRPLA

SEQ ID NO: 44462 - protein, 85 aa, unidentified
  REGION 1..85: note = Description of Unknown:random_neg_ctrl neg_ctrl sequence
LEFEQNSIDWLEPYLDETYEVMNVEVLYIEIPISMQKFIESFDLENLESYVTVGEVPDFLQPRNAYVYRMDPDTGAQKIEMLYDS

SEQ ID NO: 44463 - protein, 85 aa, unidentified
  REGION 1..85: note = Description of Unknown:random_neg_ctrl neg_ctrl sequence
IQVEDEILANAIQSESHAVTRDWSRASHDYYYPEILASYNFVYGSELKKELKKLIQNDEYAAVRYASKAPNIVSEYVHRKVELSY

SEQ ID NO: 44464 - protein, 85 aa, unidentified
  REGION 1..85: note = Description of Unknown:random_neg_ctrl neg_ctrl sequence
IENGLELKLILLSSLDQPNSAVQLTIVTMTAIIDINIHGNSSIIELVFVQKIAREVPKISNEGIAPRLFRDNMHPNTQLSSCKRN

SEQ ID NO: 44465 - protein, 85 aa, unidentified
  REGION 1..85: note = Description of Unknown:random_neg_ctrl neg_ctrl sequence
ATIPLLMQTIGFRSALAIYLKTSGYAWNISRAKLDFNERHRYVTSTSDQLTKTVRPPLSKSRTRMIRKHSKVDNQFVFSLEIKIV

SEQ ID NO: 44466 - protein, 85 aa, unidentified
  REGION 1..85: note = Description of Unknown:random_neg_ctrl neg_ctrl sequence
GFAAKPIPSIHVVIRSKTVWIRTLLYGVSNGIRPYSELCRDERGPTLFKLMYDNNSISSLIKIRGCKQSVNILYMVKVGKRCGKE

SEQ ID NO: 44467 - protein, 85 aa, unidentified
  REGION 1..85: note = Description of Unknown:random_neg_ctrl neg_ctrl sequence
RFSAYHASIEIVNKVTPNWGLINTMITYYKDPLYGSQGWVVKALFAFRNDYKDLLVIGCNIVDANVHASFSVALENSGANLGRTE

SEQ ID NO: 44468 - protein, 85 aa, unidentified
  REGION 1..85: note = Description of Unknown:random_neg_ctrl neg_ctrl sequence
SFITEYLPPLKENTLVSGADKIFLTVIIYCTWILIRVSNENPAHVSPVSKPTDNSATKLRLLKGQLALLRVQTNEVKRDKIILRL

SEQ ID NO: 44469 - protein, 85 aa, unidentified
  REGION 1..85: note = Description of Unknown:random_neg_ctrl neg_ctrl sequence
QAMKRVAIYIVSLMLKSYDKNLKECVDPKDEWPSTKAIALKEEANKKKENKFELFGIIAVVGLFWNGISKPDSRAMFLLSYIRLF

SEQ ID NO: 44470 - protein, 85 aa, unidentified
  REGION 1..85: note = Description of Unknown:random_neg_ctrl neg_ctrl sequence
EYFTTENLKFKISESLPTKVWWNIDRFGCILKKIYEDYNLVFTDKAANTPRDSSVIDSWIYLSQTIYSELFVTGLECKGLEDIKM

SEQ ID NO: 44471 - protein, 85 aa, unidentified
  REGION 1..85: note = Description of Unknown:random_neg_ctrl neg_ctrl sequence
DSVTGSFETGYHGRSLLIYFPITMLTALYSYSTTNGPLCTPIKEVNILIPIITPLENAEASGILYTPNYNPLNGAGKIFILAQET

SEQ ID NO: 44472 - protein, 85 aa, unidentified
  REGION 1..85: note = Description of Unknown:random_neg_ctrl neg_ctrl sequence
AFHSKDYEILIENKTGMKKINELVPRLGGSKSLPINPRRQRGGFIEKYVYANLVLQEFNYVVSHVLIRFNSILLDETAVISPCPQ

SEQ ID NO: 44473 - protein, 85 aa, unidentified
  REGION 1..85: note = Description of Unknown:random_neg_ctrl neg_ctrl sequence
DASDEVAYDRMQLVMKQDECVENEIVSSDGPYSEVQLETKYDMIPKVPRIEVIGFTLQIELNIYHDTKELKEIYGEGLKGSMFVD

SEQ ID NO: 44474 - protein, 85 aa, unidentified
  REGION 1..85: note = Description of Unknown:random_neg_ctrl neg_ctrl sequence
LNEDGIGPLEPWTNNVTKEVKGTVKTYNNKAMAYQERIPNVKELILKNINAESFLAGRNTVSDLKIAAEKCSLFNLKFRALLDNL

SEQ ID NO: 44475 - protein, 85 aa, unidentified
  REGION 1..85: note = Description of Unknown:random_neg_ctrl neg_ctrl sequence
DVSRYVSDCLGTSAIFQLTNAIKLRSQSFSDLIGGPFKASIFTTSSKSFWLSAGDASIVGKPGKKNSPRGQSNVKIKIFDVYAWV

SEQ ID NO: 44476 - protein, 85 aa, unidentified
  REGION 1..85: note = Description of Unknown:random_neg_ctrl neg_ctrl sequence
PITVVYFIKVYYKSVLDYGISLALAGLIHLIDLDRFKFGLAVKTKLSLQFNNTRATKNKMNNLAVPGSTKFSRPRYPLAVNMEKW

SEQ ID NO: 44477 - protein, 85 aa, unidentified
  REGION 1..85: note = Description of Unknown:random_neg_ctrl neg_ctrl sequence
PSWILIYSLVIICSVAESGAIQIPVKVIASQEVTFNLSGVVGITNEAEASYELPGPVKVGILKNELYFYIADGDDASKLFKHVID

SEQ ID NO: 44478 - protein, 85 aa, unidentified
  REGION 1..85: note = Description of Unknown:random_neg_ctrl neg_ctrl sequence
QTYGVLSIITIYWIPKKVGIGKRLFGTFLFSITKKAEETTPEKGHKPESLIGTERGFQLAPITYFLWAMKETNLKFPELGCSPMI

SEQ ID NO: 44479 - protein, 85 aa, unidentified
  REGION 1..85: note = Description of Unknown:random_neg_ctrl neg_ctrl sequence
PFGPEDQSIWKDAGYQHLRDLFVYPQANIPATITSYDWVRIVQIGEYRSELGCSHKCLVLPVIAYDNIPYIYIKELGGVLDGSTT

SEQ ID NO: 44480 - protein, 85 aa, unidentified
  REGION 1..85: note = Description of Unknown:random_neg_ctrl neg_ctrl sequence
FVESAYDTSEFALDEEVPVATKSQTNWRAFKGSMIKGNSFSAINIRVGDIRQLASARRRSDIISEFLVCVLPTCYNFTILTWDLV

SEQ ID NO: 44481 - protein, 85 aa, unidentified
  REGION 1..85: note = Description of Unknown:random_neg_ctrl neg_ctrl sequence
ESAITIEFTRNTPEGTAQLKPISHVLAVILGAMGLPNLTNTHEHPRPAELSLWKNMDEFPYAFWSDGFIGANLQIFRIDGYSNKL

SEQ ID NO: 44482 - protein, 85 aa, unidentified
  REGION 1..85: note = Description of Unknown:random_neg_ctrl neg_ctrl sequence
PETIKQMRVGDLSPVVLITGADTAGDLSLGEFPNHQPVSDKLLQKYGDHLDEDTILACSRMGKSFASEAAWMRDKIMPLIFTRIK

SEQ ID NO: 44483 - protein, 85 aa, unidentified
  REGION 1..85: note = Description of Unknown:random_neg_ctrl neg_ctrl sequence
IRQLRADKGLVLTHRSTQCNLGYIKNSGGRFYKESFQWSCQTDGMKMAIGLGRDYQGRATGFTYKNLEESQLDNKSTESIITGYY

SEQ ID NO: 44484 - protein, 85 aa, unidentified
  REGION 1..85: note = Description of Unknown:random_neg_ctrl neg_ctrl sequence
VWSKTLFEWVYEDADSEGIVLAFNHHVGGLYSLGQEQSLKWLRSGDGDKEISAEDDFNVERHEQCIISGGKERYDGYDKSAMIVS

SEQ ID NO: 44485 - protein, 85 aa, unidentified
  REGION 1..85: note = Description of Unknown:random_neg_ctrl neg_ctrl sequence
TMIKPKGQNTNPNRGAYLIDQKWTNMGPGRATEIVQESVPDFTISEEGLNVIELVLILSLAILSVTGYYQIFRIKFKELIEFEEE

SEQ ID NO: 44486 - protein, 85 aa, unidentified
  REGION 1..85: note = Description of Unknown:random_neg_ctrl neg_ctrl sequence
DIILLLLVIEYTNVNELPVVEVNKVLELRIKKFSQVLKTREEMLFKEAGNRQSAETVIVPAIKEGAGTYEIDEYNENTFDYGKLK

SEQ ID NO: 44487 - protein, 85 aa, unidentified
  REGION 1..85: note = Description of Unknown:random_neg_ctrl neg_ctrl sequence
RIKKITKLKLYFAGAMSIMDVKELISYSAGLVYCSRDYYHRVEAGTEERLIYNETINNLHGERFENETRWEKAKANVEIVMNAAF

SEQ ID NO: 44488 - protein, 85 aa, unidentified
  REGION 1..85: note = Description of Unknown:random_neg_ctrl neg_ctrl sequence
SNITWEDKHQSSDIEVLWWLLYSPLEIKNKATVEKMLMGTEKVPIRQEIGPPRDVNSDLFWSTYLEIPLNEGDSAASSGAKEALV

SEQ ID NO: 44489 - protein, 85 aa, unidentified
  REGION 1..85: note = Description of Unknown:random_neg_ctrl neg_ctrl sequence
KSLPGYSKGLEYNTNPNNKVKEKIATGELNSCINEEKYIYSHAELVPFLEMSNDKPRLAERLPNNKKSVISPVLNVLKRSLHDKS

SEQ ID NO: 44490 - protein, 85 aa, unidentified
  REGION 1..85: note = Description of Unknown:random_neg_ctrl neg_ctrl sequence
VLRPEEVPVRNPSLSKILFKTNMKTMIKPRGVTKTLDIEEGLTGTVPADERIKQSERDNSLIANWTITINANEKVVADIKVNHIG

SEQ ID NO: 44491 - protein, 85 aa, unidentified
  REGION 1..85: note = Description of Unknown:random_neg_ctrl neg_ctrl sequence
EFVKAGIHDLLGHDLKFVIAEEPFAAHLTKPISLKFPLKRIYPEQLLQRLGPDATESSLRMNAIYEINVEQSTQESSIFIGWNKN

SEQ ID NO: 44492 - protein, 85 aa, unidentified
  REGION 1..85: note = Description of Unknown:random_neg_ctrl neg_ctrl sequence
WFELGGVLRHAYEVKTGDGPTKKKQGLTQGGEHVGAENSRSFAHGYQKKVKAIMGKRQLSSVEAPLVGGVKKSKMAYFDMYVILL

SEQ ID NO: 44493 - protein, 85 aa, unidentified
  REGION 1..85: note = Description of Unknown:random_neg_ctrl neg_ctrl sequence
IPRIKYYIFFVILAKPKVSLKRNAIFGHCNIGTRSDQEFDKSHDGFSRYAPGIHLSATIIAQSLGYKREGAGDSPVVKSMSMARI

SEQ ID NO: 44494 - protein, 85 aa, unidentified
  REGION 1..85: note = Description of Unknown:random_neg_ctrl neg_ctrl sequence
LVNLISTWGKAEGDVSPIDVGVTLCDSYMVLKDIEAMKSIPADEEEGNLLFTLLNKLKGLRSGEQGRDGVKHISIDMNYQEGFDV

SEQ ID NO: 44495 - protein, 85 aa, unidentified
  REGION 1..85: note = Description of Unknown:random_neg_ctrl neg_ctrl sequence
EENYGFDLYNMFSYNGWVKDPTDTIDRFDYGFSALHIATAYGINYKILSATPYIGRAHSNLGHFVESTKEMTEAFTIFNPLDLTK

SEQ ID NO: 44496 - protein, 85 aa, unidentified
  REGION 1..85: note = Description of Unknown:random_neg_ctrl neg_ctrl sequence
NSFKGEKRNPFETSASIPKFIEDTIPTAGSITLKFPAREGNLPNIEGSKIAMIYFFPRKVYVYQAARHLNFDWIDLWLGRLSRED

SEQ ID NO: 44497 - protein, 85 aa, unidentified
  REGION 1..85: note = Description of Unknown:random_neg_ctrl neg_ctrl sequence
TQARESERSSQVIMDESAECVPRVLVSVENKFMLSNRVSGTGLFMWIGIIIEYQKKGGPNKVVCTNIIPIVDYSLMEFKGTFNLA

SEQ ID NO: 44498 - protein, 84 aa, unidentified
  REGION 1..84: note = Description of Unknown:random_neg_ctrl neg_ctrl sequence
LFDHVSSMEYRLEDFEIRNDQYYLRMLVAPEGLLKELILTEIFDSRTESYWDIPMNMDVLTEIYLTTGEPREGSLITLTFVGAT

SEQ ID NO: 44499 - protein, 85 aa, unidentified
  REGION 1..85: note = Description of Unknown:random_neg_ctrl neg_ctrl sequence
IRFPQALEGVGKARFKPRIIAQYIEKWTILNISQILSLSFEGFKRGITVDRNPKFFRMIEVPSAEIFKEIPYFFEVSMNLLLASV

SEQ ID NO: 44500 - protein, 85 aa, unidentified
  REGION 1..85: note = Description of Unknown:random_neg_ctrl neg_ctrl sequence
RPLSEKSFKLIGVSNLLPAARKEDGAKMLDLTVKIWSMDTFDDVYSHKWPVYIEKEHSRDYISLASTSGEDDVESKGVSRDVQKG

SEQ ID NO: 44501 - protein, 85 aa, unidentified
  REGION 1..85: note = Description of Unknown:random_neg_ctrl neg_ctrl sequence
KIVVSPAMGDLYVRHDRVIFLNLVGVFLLLCRENGIEKCIEKRGAIVLLKTILYLVQGDALSAQLGVIIVTIMSAESDKVFAIIL

SEQ ID NO: 44502 - protein, 85 aa, unidentified
  REGION 1..85: note = Description of Unknown:random_neg_ctrl neg_ctrl sequence
LTNFLQELIRVVFLIVCTPGGTKQLINYAIFWEDPMIGIYCFTFIRKSLVNRSMTCSYINGALKVGAVSFENVDPRGKKDGRFTL

SEQ ID NO: 44503 - protein, 85 aa, unidentified
  REGION 1..85: note = Description of Unknown:random_neg_ctrl neg_ctrl sequence
LKGAGIVTMTFAVTPVQSDYYPIDNDIGTNLKDLIPTVLGIDAGKSLTYHYINQKYGTITVFSLGVNYDIRGNFYHAIILLKISY

SEQ ID NO: 44504 - protein, 85 aa, unidentified
  REGION 1..85: note = Description of Unknown:random_neg_ctrl neg_ctrl sequence
ADRTHGVASIFDGSIKIYLGIIVIVIVGPYCPYSSIKNGAPIIQEANVKFDYLAGGKAWQPCNGNGIVIPINVNEHPSYCMIYLS

SEQ ID NO: 44505 - protein, 85 aa, unidentified
  REGION 1..85: note = Description of Unknown:random_neg_ctrl neg_ctrl sequence
AADITSSYNYILAMDYGILGYKTIEIILFTATVALGQAYVGVISTPLGILVDSDEQRDLITAKWPVYQRLRTSAHKIKRVQYRLS

SEQ ID NO: 44506 - protein, 85 aa, unidentified
  REGION 1..85: note = Description of Unknown:random_neg_ctrl neg_ctrl sequence
LRDAENRPTNTVCRDLMMVGLNFRCEITEPGFLVRLTSMTDELLLAKAIGTGSQVPGVFQPQDTHMNTESIVENTKIKDELSGLI

SEQ ID NO: 44507 - protein, 85 aa, unidentified
  REGION 1..85: note = Description of Unknown:random_neg_ctrl neg_ctrl sequence
SWDIVFDYNIMLNREEMTNRWKFTSNNIFSRLINTSRILLLKYKNYFDYANVIEIFILNGASQGFRTLDIEQIANASIHDWTVSK

SEQ ID NO: 44508 - protein, 85 aa, unidentified
  REGION 1..85: note = Description of Unknown:random_neg_ctrl neg_ctrl sequence
IHILQYVASIPMRKTYHYNDWACTRFIEGFLLPIETPVPECIQRARQKFDVSLPDSLISNLAHLDVGEPEDLERVHFAGYARDHR

SEQ ID NO: 44509 - protein, 85 aa, unidentified
  REGION 1..85: note = Description of Unknown:random_neg_ctrl neg_ctrl sequence
VSKLFYKLEAASGLAWIKLVEGEGYYSKDGSDVTTILTVDCINEIPGFEGLSNKDLCEPTIKALDDEYKSDYGLNAYAILNEIIL

SEQ ID NO: 44510 - protein, 85 aa, unidentified
  REGION 1..85: note = Description of Unknown:random_neg_ctrl neg_ctrl sequence
AIVERPNDLEIVGNFINQYNGARDGNSYISIPWQKGEYDYDEEVYDEDSHASPIELSIILNIVQATSAICEGKVKGFYFKLIKIV

SEQ ID NO: 44511 - protein, 85 aa, unidentified
  REGION 1..85: note = Description of Unknown:random_neg_ctrl neg_ctrl sequence
HEHIKGYHPSRKTVLSAMFYYTIIYSIWFYLARILSILPNNEIGICSGKCKNSGSGSIPLKVSDINKVEDRSVKAPYQYSIEAIL

SEQ ID NO: 44512 - protein, 84 aa, unidentified
  REGION 1..84: note = Description of Unknown:random_neg_ctrl neg_ctrl sequence
IQKEYNQTASLDRKTIPHKHLTQAGLYIGSFSLAAYLKIRQVSIGISRFGNAGLLRKYPVETDSKLDTKCDKYSKVIFNIQLLN

SEQ ID NO: 44513 - protein, 85 aa, unidentified
  REGION 1..85: note = Description of Unknown:random_neg_ctrl neg_ctrl sequence
MFTYGVDPKIQLDDPSGQFGHTIVCAIKVARTGITVFDSLCVNKEQQLHMTIVETKVNPVFEQLFYLLIFGTSIKVRDLELEIIV

SEQ ID NO: 44514 - protein, 85 aa, unidentified
  REGION 1..85: note = Description of Unknown:random_neg_ctrl neg_ctrl sequence
ISIIGKKSSIHSLSLDSESSIVRTPKPSIGEDCAMAINTMSEPQKVCSKDTNCPNFEGNLISEKQIKRLVKGIDPTQTLEATVGK

SEQ ID NO: 44515 - protein, 85 aa, unidentified
  REGION 1..85: note = Description of Unknown:random_neg_ctrl neg_ctrl sequence
PELDVGIAIFEWNNTVPTINDIAYTLRYANSMIEGESLKSELLSNIGFVSAQIVLEDRLRILIAPMLTQIMNYKMSIPGSIIKDS

SEQ ID NO: 44516 - protein, 85 aa, unidentified
  REGION 1..85: note = Description of Unknown:random_neg_ctrl neg_ctrl sequence
KGTDVRPKFLDVVFIIIGIEQATFIKFTKFAYSSNIELLVVLLLSAKIKACTYDGGMKLFDSASFVCRSYTEFVRNPDVIGYVYY

SEQ ID NO: 44517 - protein, 85 aa, unidentified
  REGION 1..85: note = Description of Unknown:random_neg_ctrl neg_ctrl sequence
IIKLIHDSYKIWLNAYVYLSKSVQITLRGLRHKLSGEAGPASPFIKYNTKKLTGLAENSTRLAKVAHESMKEDATVWSTDCEAGT

SEQ ID NO: 44518 - protein, 85 aa, unidentified
  REGION 1..85: note = Description of Unknown:random_neg_ctrl neg_ctrl sequence
ILKRELASPSFNGETRKELSICLSCVIFILYSYKLGSTTGLFKTNNNIISSPSRELNIRQEKDTRAMVNLESYPDIKQIYFYYTQ

SEQ ID NO: 44519 - protein, 85 aa, unidentified
  REGION 1..85: note = Description of Unknown:random_neg_ctrl neg_ctrl sequence
LKKINKGTITGFFSDKGCREFSQNFIGSVSGRVYSRTIRELIPCMLTSKLGGENRSHTGATISENFRLYTGQSAALGTEPTDITG

SEQ ID NO: 44520 - protein, 85 aa, unidentified
  REGION 1..85: note = Description of Unknown:random_neg_ctrl neg_ctrl sequence
DVLGSVDDDKMLADLWRARKLHTGLCHANSREQEMDPPLDYIILVVYSSLKLWDDEYDKLWNSLKGWKAPYIEDIKANSKELVAE

SEQ ID NO: 44521 - protein, 85 aa, unidentified
  REGION 1..85: note = Description of Unknown:random_neg_ctrl neg_ctrl sequence
HLENQLVGPCSRKPEPRGPLSDNTFIGDHFVRNDVEGKEARYSALRDGSVILVLDSQDGPVDVALDCAGSGEEIERADMERSAYD

SEQ ID NO: 44522 - protein, 85 aa, unidentified
  REGION 1..85: note = Description of Unknown:random_neg_ctrl neg_ctrl sequence
NKPGPLCKTKLSIEQIINCSDLPGLDMIFFWNIKFICECITDREEIRFVSTKLKRLTRNATVNDEKVIVESGIAHSIASSYFIFW

SEQ ID NO: 44523 - protein, 85 aa, unidentified
  REGION 1..85: note = Description of Unknown:random_neg_ctrl neg_ctrl sequence
FIYKTSKMTMDLVDLTGEEVGLPIEGINPRASYFIKVYRVVEGLDMYEVFAQWRINQVMRIYLKTNGDNDMCYLGAIKWEGLAEF

SEQ ID NO: 44524 - protein, 84 aa, unidentified
  REGION 1..84: note = Description of Unknown:random_neg_ctrl neg_ctrl sequence
HTIESEAGSFEPLSDARQIAGDFLIGVMTLSQYPTLFLDRVRQYWEWNKTGMRPNIKISANCSTYIGLWLPKFEKSLRTIVEET

SEQ ID NO: 44525 - protein, 84 aa, unidentified
  REGION 1..84: note = Description of Unknown:random_neg_ctrl neg_ctrl sequence
NFVCIAITAKKLWRFLDIFFLRLTRGNKIMKPSAYQKCDQVNSVGSVTAKLWHIRVFHVILKLECYCADNLTLPPGSVKLIPIK

SEQ ID NO: 44526 - protein, 85 aa, unidentified
  REGION 1..85: note = Description of Unknown:random_neg_ctrl neg_ctrl sequence
YYGASGAITIIALKIPLIEDATATIIVMRTQWDISDRLGGGSFRTNIAQIIEGVAFIFKPQDIDHAKQPEAALAKFSGTIRPVRV

SEQ ID NO: 44527 - protein, 85 aa, unidentified
  REGION 1..85: note = Description of Unknown:random_neg_ctrl neg_ctrl sequence
NEGESAMKGVEEVFSNKLEIAHFDISLGDSVLPVDCTVLLAFAHASSFLTLGDDTDMQLILLSRWLISVNVRFPIAETLIAFLSF

SEQ ID NO: 44528 - protein, 85 aa, unidentified
  REGION 1..85: note = Description of Unknown:random_neg_ctrl neg_ctrl sequence
NDLEKIKGKTVATNYMVFSMLLTEYLIERKQITEVPILVNLAAIMLSDDVIFPSVQILGPMANMYKNYFFNEWLVEDATEVLYSY

SEQ ID NO: 44529 - protein, 85 aa, unidentified
  REGION 1..85: note = Description of Unknown:random_neg_ctrl neg_ctrl sequence
ARIAIKEHFLMNDDTRDQGVMNRDGLGFNNVTLVILIWMSGLSMFTCLPDSRIQIDGYRRKPLPGSDWPKEIYVEYSEQAIEMRS

SEQ ID NO: 44530 - protein, 85 aa, unidentified
  REGION 1..85: note = Description of Unknown:random_neg_ctrl neg_ctrl sequence
EGFIRYLGIDLTDNFTQLEKIIPCFSVISYVREPGYSIFLQDCLHPIKLKGLIVQYKFSYLFTLGVTAQRTAVCRIPTYEKINQL

SEQ ID NO: 44531 - protein, 85 aa, unidentified
  REGION 1..85: note = Description of Unknown:random_neg_ctrl neg_ctrl sequence
FFSYYFFVSTIDSDDWWIVNGFMRFVGFKNHKRRSLGYQEGNQFVGSTLGDWRLFSNKLSFKRLVFFCSNLTKFTVKNIFCSRGD

SEQ ID NO: 44532 - protein, 85 aa, unidentified
  REGION 1..85: note = Description of Unknown:random_neg_ctrl neg_ctrl sequence
NLRLSHDGKTEGILVLRLRVIVIKVPNFALEEIRTGGGESLSEPLGPYLGYRTQTRDMLHAFSTKLSCSTTILEKVGSPCNRDNY

SEQ ID NO: 44533 - protein, 85 aa, unidentified
  REGION 1..85: note = Description of Unknown:random_neg_ctrl neg_ctrl sequence
PIYNEIQYAAWIIPFYTDMSEKLIKSSCFIKIWGIQPNATVFGPENIIAAALDALEAVILRHVDSALSFFEDKIYIPLDKEVHAV

SEQ ID NO: 44534 - protein, 85 aa, unidentified
  REGION 1..85: note = Description of Unknown:random_neg_ctrl neg_ctrl sequence
VKSIFLVNLDSEKKPPANKHLGGLPSHEHMNGAKKEHLIDRPTKKTILNAKVLEYKVILYENVCDSTIADKSCEGSNENTVPARS

SEQ ID NO: 44535 - protein, 85 aa, unidentified
  REGION 1..85: note = Description of Unknown:random_neg_ctrl neg_ctrl sequence
VPAEISSINMVTNKAHLSILLTLIHIFESLTIAVSFVDNEYILIGANTKKLFGDKAKEFIQELVDVKNGRGGYLPELAMKKYPAP

SEQ ID NO: 44536 - protein, 85 aa, unidentified
  REGION 1..85: note = Description of Unknown:random_neg_ctrl neg_ctrl sequence
AIFARWIFTRTGPERKRKVGPLWARTLDKLSLSSVKYIASVNHIEKLDMTKRDGDCEDLANGKITRGIASNNDYGAVYRVVCYKP

SEQ ID NO: 44537 - protein, 85 aa, unidentified
  REGION 1..85: note = Description of Unknown:random_neg_ctrl neg_ctrl sequence
KHLTTVTLEILLKFKKSIPRIVEQQDGRVSFNASKILPSDGKKAWNVGVDFLNLVSPLHPISVAGFKYTAESEPALGDDIQVSKY

SEQ ID NO: 44538 - protein, 85 aa, unidentified
  REGION 1..85: note = Description of Unknown:random_neg_ctrl neg_ctrl sequence
LIYPSPQSVANITYDLYGKATGTETGLPVSSASVLLRADLAKEDENYVLGGTLYKYSTKLQEQARCEVNINIFGYFPTDAWLVMF

SEQ ID NO: 44539 - protein, 85 aa, unidentified
  REGION 1..85: note = Description of Unknown:random_neg_ctrl neg_ctrl sequence
ALQVTLRDTLFRSFTPDINNALWISSTVNYALSSSEILKGIRIASDVLTPCLSYICVATKLVNQVSTIVVVRIFVLLERQIAEFL

SEQ ID NO: 44540 - protein, 85 aa, unidentified
  REGION 1..85: note = Description of Unknown:random_neg_ctrl neg_ctrl sequence
PASHKWIVNADDYAINMLKEEAVEEVIIKVPGKPILYSQFNNKFTYLTYLLWRISARSKTQVGGGLLAINDEVDIDKLEILTVLA

SEQ ID NO: 44541 - protein, 85 aa, unidentified
  REGION 1..85: note = Description of Unknown:random_neg_ctrl neg_ctrl sequence
SKQNDSISLEDRERRTIARKPTKIDLFKVLDHENLLQCIIGPISVLANFSDQVAHSNYKTLSVLIGEINQLKVSKTSSFDAPTFE

SEQ ID NO: 44542 - protein, 85 aa, unidentified
  REGION 1..85: note = Description of Unknown:random_neg_ctrl neg_ctrl sequence
NLCIILKNDNAQGPAIKYSSKWLDQIKQKLSENTEVRAFSFRSIPKDLQNPMSIGLNVDLGMLVMSEGFVKVVRVTEKAKATLTK

SEQ ID NO: 44543 - protein, 84 aa, unidentified
  REGION 1..84: note = Description of Unknown:random_neg_ctrl neg_ctrl sequence
PSALLEAYESTDNFANNFKFSLAFMKSDLLFKSSAIAGGMNDQDHTHINYSEGMNNSLCDKEQDRFNIYYYYIHTVYADFDWAD

SEQ ID NO: 44544 - protein, 85 aa, unidentified
  REGION 1..85: note = Description of Unknown:random_neg_ctrl neg_ctrl sequence
AVVNCEPCKEIGKNVEENLKLISPNFPKYAGPEVDSAKIINDETPTEPLYPVLAMAPILLAGTNNRIYPGAEAIIGKILERDMSQ

SEQ ID NO: 44545 - protein, 85 aa, unidentified
  REGION 1..85: note = Description of Unknown:random_neg_ctrl neg_ctrl sequence
LSLAYIKRYLTTQKLGIDIAENHGCIYELFTTDWIYNVEDSILIIKITNKITIPFLVKKINSVEETEIHPRIEYRAKPNRSVLAF

SEQ ID NO: 44546 - protein, 85 aa, unidentified
  REGION 1..85: note = Description of Unknown:random_neg_ctrl neg_ctrl sequence
TQEVEPLCVLDTSKKIVFSADGMLCDADTVHLSKFLLIEENIEIDDPSTEKTEIIAATGIIEKGWLIPEVSSETDNNGERQRVLR

SEQ ID NO: 44547 - protein, 85 aa, unidentified
  REGION 1..85: note = Description of Unknown:random_neg_ctrl neg_ctrl sequence
RTHEFNKGFDKGPCKMKLTPSTFTIEKPSYAETEKYSSTEGLKSNQKKKLVLFLITDIQFHKSQNKLAKVVIRILIPNVLALYRD

SEQ ID NO: 44548 - protein, 85 aa, unidentified
  REGION 1..85: note = Description of Unknown:random_neg_ctrl neg_ctrl sequence
YKASLAVKEVYARTNTVVSQTVSPVSMISSNLIPLGYEPKETFAWELGWNEILMFKIEIRAVNLLENTNTTIAFSDLSAKFTIVD

SEQ ID NO: 44549 - protein, 85 aa, unidentified
  REGION 1..85: note = Description of Unknown:random_neg_ctrl neg_ctrl sequence
SNYSVTIREIQETAVPSQNVHATRLIVKKTFNNNATACNAFINMVNRALMYRAQPFSYIKRRIFVLRITSPGLGYKTEIIVEPLA

SEQ ID NO: 44550 - protein, 85 aa, unidentified
  REGION 1..85: note = Description of Unknown:random_neg_ctrl neg_ctrl sequence
KLNYVQSDFGTLNPRHTYELNYKMIVVASEEIDFLIGKPDEYEGVLDIVVAQLLMVISLEWPSKIEFRPVTPVEYVRLYISAYPA

SEQ ID NO: 44551 - protein, 85 aa, unidentified
  REGION 1..85: note = Description of Unknown:random_neg_ctrl neg_ctrl sequence
DSFMTESEGTGSIEFLVDIILMKTIVCLLEYRNLSVVELGQRNSATGEIVPEYLIIPEPETGNMGGSKEFKMTCAEYYPPSFYLS

SEQ ID NO: 44552 - protein, 85 aa, unidentified
  REGION 1..85: note = Description of Unknown:random_neg_ctrl neg_ctrl sequence
KYELSKFDIGSLLEAEEAKSEEAGLKNSYRYTLLDTAITEDTVYLSISDRIIIQLPKKEKATLICFWDNGGRMHDAIKKMYCVTT

SEQ ID NO: 44553 - protein, 85 aa, unidentified
  REGION 1..85: note = Description of Unknown:random_neg_ctrl neg_ctrl sequence
KPDPLFYIITATPHEPLYASESTEVFKMLEMLADGDQNGYNYNQDGYPTSTIEAAPDNVSVRLGPCTLKVEDQSTYFGAGKGGDS

SEQ ID NO: 44554 - protein, 85 aa, unidentified
  REGION 1..85: note = Description of Unknown:random_neg_ctrl neg_ctrl sequence
TRHQHEGTNTELKPNSDKGVNKASDPAGFAPTNLNIAQNHPNLGSRSALLTKCEILMEVGKNRDALLNESSTTMMNINHYKLEVF

SEQ ID NO: 44555 - protein, 85 aa, unidentified
  REGION 1..85: note = Description of Unknown:random_neg_ctrl neg_ctrl sequence
LRWIGTSEMRENGVPRFFILILKSSYKVKKAVSLYVVAAVLMVFSENIQVGTNPDTAELNPKSDLKNASKGAITATIKGIQKIIA

SEQ ID NO: 44556 - protein, 84 aa, unidentified
  REGION 1..84: note = Description of Unknown:random_neg_ctrl neg_ctrl sequence
KYAKAKNGLEPTGGKIGYSKYKLKVLCKRESNIPVITAKMLFEEYERINGSTIKIVPESFNESPQFGNILIFRFADIGPTSLFN

SEQ ID NO: 44557 - protein, 84 aa, unidentified
  REGION 1..84: note = Description of Unknown:random_neg_ctrl neg_ctrl sequence
YPKFFKLLPILSNNREQFALPTLMMKSQVVVILNKVRLSAFIGYFSVPGLEMIKEDGVLIVIQNRWYLLLYVWVSEFVPFNKNA

SEQ ID NO: 44558 - protein, 85 aa, unidentified
  REGION 1..85: note = Description of Unknown:random_neg_ctrl neg_ctrl sequence
ESKSVDKYLPTSIVVTFIVRYQLVDWRLLIFTEERAYMRSYKTADKEWPAFLTGARTNVGGQDLALLYQHEYTDVEMFNILKYIV

SEQ ID NO: 44559 - protein, 85 aa, unidentified
  REGION 1..85: note = Description of Unknown:random_neg_ctrl neg_ctrl sequence
EIKIVLVSLTAVRAVLAGVYTEQSTGERGEKKEGAEEDHFMANTDGAYFGLMTPEVSVVLNFNLLPSSEKERLSDGALLELEQKG

SEQ ID NO: 44560 - protein, 85 aa, unidentified
  REGION 1..85: note = Description of Unknown:random_neg_ctrl neg_ctrl sequence
RALREANKEFVATFKETEPAEKHINPIFFIDKDYFKIASMPIHEDIKVNRNTIIMLGIESKENPDVVFVEYFEYGNDPTPSFKHA

SEQ ID NO: 44561 - protein, 85 aa, unidentified
  REGION 1..85: note = Description of Unknown:random_neg_ctrl neg_ctrl sequence
SGGGKFIDDGVAMVELYIGELRLFSLNNLPVKGSLLFYSLEFQVDVPGYILEFGKVDARTKLDQNFPITVLANCPNDEITIQIMR

SEQ ID NO: 44562 - protein, 85 aa, unidentified
  REGION 1..85: note = Description of Unknown:random_neg_ctrl neg_ctrl sequence
LTFLYSAPFDKFADASPVQLILSTLNNIQVVELVKFGVKPYAELQFHNEVSDGNEGYAGPVMTVFKKTRAFCPKDVIFKKALIRG

SEQ ID NO: 44563 - protein, 85 aa, unidentified
  REGION 1..85: note = Description of Unknown:random_neg_ctrl neg_ctrl sequence
DRARIILDNLLSEIFIVIKNVGMKGTLLMAFVKETLAGIFHVGVANIFYGGDPVVNIVPKHTYIIEEFGGFSPTLDIYYRRIVDS

SEQ ID NO: 44564 - protein, 85 aa, unidentified
  REGION 1..85: note = Description of Unknown:random_neg_ctrl neg_ctrl sequence
VNAGKHVKITTYTVPAGKRTLFAFITHYNNQLKIDSGTATHKVTSNQIHPFKELSFNAELGSFKAGMFAPERCVVVTFQDPFQMK

SEQ ID NO: 44565 - protein, 85 aa, unidentified
  REGION 1..85: note = Description of Unknown:random_neg_ctrl neg_ctrl sequence
ARAFLDQEPFLGSKRHRGLSPRMMQEGLQIVAEVTKASFSCGEVPSFSADKKLRSRKKQLRKHDIEAPKVNAYKKKRLFHRYPTQ

SEQ ID NO: 44566 - protein, 85 aa, unidentified
  REGION 1..85: note = Description of Unknown:random_neg_ctrl neg_ctrl sequence
FADGNIDKKSDSMEIQGIKQYDSVGEIRRPEAKKRLKITSGIVFLELVATGFAAVILPLKTQMQVNMTYRVSKFPGQVFVMADAL

SEQ ID NO: 44567 - protein, 85 aa, unidentified
  REGION 1..85: note = Description of Unknown:random_neg_ctrl neg_ctrl sequence
AQLFRSGGDFLVRIVGTIYAEKLYRANITFGSNCGGNGLYDIPVPVCGDSLVQSTKCTSNDDIWVFICFSLSLCCTYISKYVKAG

SEQ ID NO: 44568 - protein, 85 aa, unidentified
  REGION 1..85: note = Description of Unknown:random_neg_ctrl neg_ctrl sequence
KHDLISSGFTEAPTYLAEYRPRTAEIQNAYIITDMNNTTVFRKAINQFDRHSVIMVPKTAMHERSIKNISGIGPGIRSSSLKLYG

SEQ ID NO: 44569 - protein, 85 aa, unidentified
  REGION 1..85: note = Description of Unknown:random_neg_ctrl neg_ctrl sequence
YDTSEKTGWRKINYQKEFENGKPIIWSFSFIRKPPAPYIYVKLNSQLYLKAKLIRFSYAAISTAYNIMSKKIAYGSNTTEDWERF

SEQ ID NO: 44570 - protein, 85 aa, unidentified
  REGION 1..85: note = Description of Unknown:random_neg_ctrl neg_ctrl sequence
KFSRSTLMYITYRFSIDFFIPVDSVPEIRAERIDLPAESRYTEHIALWAYAAKFDKGYYLLIALEKSVAQSALERFYKDPFKGMK

SEQ ID NO: 44571 - protein, 85 aa, unidentified
  REGION 1..85: note = Description of Unknown:random_neg_ctrl neg_ctrl sequence
ESSDSLESYIAWSGLVSEAIDPYEPQSVPSSEANFSESLFPGTYLEIVYKDGTLHMFVQWSQQIKDIQQLESICDKQLPESSRPG

SEQ ID NO: 44572 - protein, 84 aa, unidentified
  REGION 1..84: note = Description of Unknown:random_neg_ctrl neg_ctrl sequence
HNPFWWAYGRLKDGMIDDAKSERPKKTLHLVDEIVLRSRFKFSRLERERFAFNYNEDFETEINQIKLLHGIHQMIGPQQFARQS

SEQ ID NO: 44573 - protein, 85 aa, unidentified
  REGION 1..85: note = Description of Unknown:random_neg_ctrl neg_ctrl sequence
MISMGINTPGSTDLSKNNMEKNVITLMNLTLLIELIARVGLYNAYREQVTEIGGYRWEKVMPPNKSQEDLANIRAQGEEIDEPLK

SEQ ID NO: 44574 - protein, 85 aa, unidentified
  REGION 1..85: note = Description of Unknown:random_neg_ctrl neg_ctrl sequence
GALSSKDGNGLIFNLSRNKFIDLSMILQAIKMGRSPIILPNEYGDADEMYNPVDAFPYDCDLMFNDTVVRKVIEKAHEPIHNKGA

SEQ ID NO: 44575 - protein, 84 aa, unidentified
  REGION 1..84: note = Description of Unknown:random_neg_ctrl neg_ctrl sequence
MLSKIRIGKLVTYKAHDAITGIIPQNPSSTSQHLGRFNAIAMRAVLGAIGGLPAKPYIEQSSRMSQNFENRVAYPGKPNLQRLI

SEQ ID NO: 44576 - protein, 85 aa, unidentified
  REGION 1..85: note = Description of Unknown:random_neg_ctrl neg_ctrl sequence
IDAVLRVSGELRLKKKKHLMHKKNKFNEFSIFFGNEIFEQENEELIGLLYLVYSFNWESNLKIDTFDFSGETWAGIELAEEVVCM

SEQ ID NO: 44577 - protein, 85 aa, unidentified
  REGION 1..85: note = Description of Unknown:random_neg_ctrl neg_ctrl sequence
GKWYRAIKSVELQSAFRVDVAPSVGSIKGDALGIHIIYETDTLVTVYRELLTNLGVGLLNEADIVARAPKFCYNRLFPANQDPFR

SEQ ID NO: 44578 - protein, 85 aa, unidentified
  REGION 1..85: note = Description of Unknown:random_neg_ctrl neg_ctrl sequence
PSESISKYMPGYKGDIQITFLIVTYFRNGEIARVNVGCPPQSERDAEGGAKKDLSINKRGSKNFIPAMQWIYIFRLWWKNCYLFE

SEQ ID NO: 44579 - protein, 85 aa, unidentified
  REGION 1..85: note = Description of Unknown:random_neg_ctrl neg_ctrl sequence
DSMFDLYLPNTVIRHPVPQAVLKEIIGVEFVVGFLPGITDSGPSHKDVPALICDFRADFLTISYVGPLGIIPELSLILTFDFLGS

SEQ ID NO: 44580 - protein, 84 aa, unidentified
  REGION 1..84: note = Description of Unknown:random_neg_ctrl neg_ctrl sequence
RLSYIVYKIFFVETKSLNICIKLTDFKRLFLNQRWMGYKENLGKIISLGSGPHGINGETEREYQNRLKQSFKSTAMEGLSNDRI

SEQ ID NO: 44581 - protein, 85 aa, unidentified
  REGION 1..85: note = Description of Unknown:random_neg_ctrl neg_ctrl sequence
YEIKYRQICVALVKYLVALETLYPPGTPKQLKYRANSAIRDILIGKAMCIQLVATILSLINTMMISLGQGALPGLIGDDKTINLY

SEQ ID NO: 44582 - protein, 85 aa, unidentified
  REGION 1..85: note = Description of Unknown:random_neg_ctrl neg_ctrl sequence
IRSLSYYARKSIGFGLLTSRIGDIGLKLGRRSGRQMETLNDNSVSSNVAWSMGDAGEEPLDGGLFFGVNRRLIFEIQKPMKLFDK

SEQ ID NO: 44583 - protein, 85 aa, unidentified
  REGION 1..85: note = Description of Unknown:random_neg_ctrl neg_ctrl sequence
EWEDIQLEYKIVSQKLQDIASIPKIILYAVSTEIILVNYFPRIDITREEHMEALRMTRYFYVKGKEIIMQWRMLSSDAVSDEVAI

SEQ ID NO: 44584 - protein, 84 aa, unidentified
  REGION 1..84: note = Description of Unknown:random_neg_ctrl neg_ctrl sequence
LRNQQKSIQNIPEDKLFHYESSNGTIGLNELSYDLASIVIEDRINIIWIITFEQADRIPDVGNEGSVQTSDAFGTVENEVTPTA

SEQ ID NO: 44585 - protein, 84 aa, unidentified
  REGION 1..84: note = Description of Unknown:random_neg_ctrl neg_ctrl sequence
EPNYLGSVLAGEIFPEKTVVFNLLMETLRKYTLARTKYEDFIVSGIMEKKKIDAAENHSLNAGALWSTLDRGDATVWRFNNTIT

SEQ ID NO: 44586 - protein, 85 aa, unidentified
  REGION 1..85: note = Description of Unknown:random_neg_ctrl neg_ctrl sequence
KIGQPFAILDVEQKNLSSTDRNGVKKYNHAYVQPAPRPVPVCLDNPYVILKIIARPALKAICVNSILMLDISCLFKTSYIVKVKN

SEQ ID NO: 44587 - protein, 85 aa, unidentified
  REGION 1..85: note = Description of Unknown:random_neg_ctrl neg_ctrl sequence
LDAKGNQANSEQLNCAVTSSVLQKNVSFDGPKEAACEITSRTTYITPLKISLPKYIYKSGHTYPPKGHDLMETKEVKNLMKLNVF

SEQ ID NO: 44588 - protein, 85 aa, unidentified
  REGION 1..85: note = Description of Unknown:random_neg_ctrl neg_ctrl sequence
NLSSIIILSNVLDKFPDSEYDNFAYVSLNTAVHRMRTLTIRSRYRMIISIVDAYLTELLKLQGLNSIRHGAALREGGKWINNNKA

SEQ ID NO: 44589 - protein, 85 aa, unidentified
  REGION 1..85: note = Description of Unknown:random_neg_ctrl neg_ctrl sequence
HNVQFNPPFFLCCKDNLKLRNIVEGIATGEQNYNGYGASTFTFLSQEGMDFLAVGVMIITPEGEGSLSSSVVEGYLFVLQVTMKV

SEQ ID NO: 44590 - protein, 85 aa, unidentified
  REGION 1..85: note = Description of Unknown:random_neg_ctrl neg_ctrl sequence
EQYSLERLDNAKKPLSLGFAQPPAIYIGYNTIALLLTAENKSSVKKLNSKVSYGVGYILRERTQLSAEDYSVSTSVFSMFDTKIS

SEQ ID NO: 44591 - protein, 85 aa, unidentified
  REGION 1..85: note = Description of Unknown:random_neg_ctrl neg_ctrl sequence
GEIQIQGVNYNTLREQKNITILGDGRLLFDSKLKDLKTIAHVVVAFQSYKLNTHYSNSGPRKNIYIVIAIFGNNLKNITSNDKKL

SEQ ID NO: 44592 - protein, 85 aa, unidentified
  REGION 1..85: note = Description of Unknown:random_neg_ctrl neg_ctrl sequence
MYGIKIGISMLWVNELLDILVLTNEGIRHVLWEVLVGHDVSVLNIYAIIKKRIVCIWCDRGFKRIAGTNVNPRIIYVTLFGNGFV

SEQ ID NO: 44593 - protein, 85 aa, unidentified
  REGION 1..85: note = Description of Unknown:random_neg_ctrl neg_ctrl sequence
IYLRRGEHNVSVLPLDYDALINIETEKLVKIRDVVAFTTSKDTSYGLNKEVAIDATSQSALDDPEYFRKPKRPKIQILLIISRKK

SEQ ID NO: 44594 - protein, 84 aa, unidentified
  REGION 1..84: note = Description of Unknown:random_neg_ctrl neg_ctrl sequence
LEFSAYIEVLWSGSPSPLVNLFIYSFTSTYNSETPALTVCRPEPAYIIDLMRILVGNYNENVLYVGLNLRSGVRKICSDSPALE

SEQ ID NO: 44595 - protein, 84 aa, unidentified
  REGION 1..84: note = Description of Unknown:random_neg_ctrl neg_ctrl sequence
LDKLELAAWDTDSMQNPELGWPTKVAEVRGMRKGVTLADTGKIRQFEFKKYGQESQGTGAAPREHDEAKTNYGFMVTDWAEYNI

SEQ ID NO: 44596 - protein, 85 aa, unidentified
  REGION 1..85: note = Description of Unknown:random_neg_ctrl neg_ctrl sequence
DRANLMSLFREFGIVENIAISLSALVGRFDEIINVCQSEFFMSENKLPFLANFEYIVKIAFWKGKVVTVQTLMNVELLIKLKNCR

SEQ ID NO: 44597 - protein, 85 aa, unidentified
  REGION 1..85: note = Description of Unknown:random_neg_ctrl neg_ctrl sequence
VVSALRIIVISCLLNVGSKFSENDSMAYKNLKGKVFVKEYRKLAEFSIFHSIVKSGTDMTPEEANTSETSISDKLREDKENYLWK

SEQ ID NO: 44598 - protein, 84 aa, unidentified
  REGION 1..84: note = Description of Unknown:random_neg_ctrl neg_ctrl sequence
MMSISGVSRSGDIVAKESNVNDTGVLDDASAEVCFSSAYSAAEGGQVQTSVSVEGCMNSVKAHGNSLLKIETIDRATLVGDLST

SEQ ID NO: 44599 - protein, 85 aa, unidentified
  REGION 1..85: note = Description of Unknown:random_neg_ctrl neg_ctrl sequence
PMNIRMVSFETELQKYDIKNLGKCYTFDMWEGTISLHGPGRIIPRAIIKKFIHSRTTHSGGEAGTDSGPKEQLRKGIIRKSFNRQ

SEQ ID NO: 44600 - protein, 85 aa, unidentified
  REGION 1..85: note = Description of Unknown:random_neg_ctrl neg_ctrl sequence
SMERNSIPDIERGEALFSRRLKEGRANYADKYPGTPNVVSVSPSWADMAEEIYSFGLYVFQLDSILIVYPLYPPLPILLKCKNTF

SEQ ID NO: 44601 - protein, 85 aa, unidentified
  REGION 1..85: note = Description of Unknown:random_neg_ctrl neg_ctrl sequence
AGTASSNFTHTYSCISSLNLSIATDLGAWVPIIMSIIQGFGQAYAGGGYASSPIIGVPENATLAILIGIEFNRPQIPDNSSFPFV

SEQ ID NO: 44602 - protein, 85 aa, unidentified
  REGION 1..85: note = Description of Unknown:random_neg_ctrl neg_ctrl sequence
VISKEREGLYPRMNLLDFLAAIGVDLSGYPIYFTVDFGSRAYSGYNKKNNKPTVCLLKGNLAFGVTIRHKRGYVGLDEEFRFHGF

SEQ ID NO: 44603 - protein, 85 aa, unidentified
  REGION 1..85: note = Description of Unknown:random_neg_ctrl neg_ctrl sequence
DSESCTATNSYPIEAAYIAVQNKLRMNRRYKKINHLLVDICATNSVHKVVAAKSKQHLSYELSTVTAFNRYTFILDNVGWLREEG

SEQ ID NO: 44604 - protein, 85 aa, unidentified
  REGION 1..85: note = Description of Unknown:random_neg_ctrl neg_ctrl sequence
YSWSRYDGTIPVNVNKFQDYQLEKATVHVYCTDPNNKTKYKGGKILYWNTWAIPIINIAEPETGNVGNIVYWLGVCVLQTDVPNP

SEQ ID NO: 44605 - protein, 85 aa, unidentified
  REGION 1..85: note = Description of Unknown:random_neg_ctrl neg_ctrl sequence
LFLSSRGGILTAIQLNKPSDVAKSTDSKKVPKTKEFRRYGTEFFEEGGSVARDFAVDVNPYSDFIFGSRMKLIVAHRSETGNETD

SEQ ID NO: 44606 - protein, 85 aa, unidentified
  REGION 1..85: note = Description of Unknown:random_neg_ctrl neg_ctrl sequence
SSIYCGPSFSHPVPLNSNYQMRVAPGNGEKLPPARIAFSSIFTGPWIAISNTYRIKIMNVKVISIEVDNKEDTSRGTEEELFNDY

SEQ ID NO: 44607 - protein, 85 aa, unidentified
  REGION 1..85: note = Description of Unknown:random_neg_ctrl neg_ctrl sequence
VTSNGGDLDKDGTTRKKSAGFSSVLGEPPQLKPLVVTTKVLLNLVRPGVPLGMNTVCQAYIAGERIGDGICKNGMPKIDLSIVPR

SEQ ID NO: 44608 - protein, 84 aa, unidentified
  REGION 1..84: note = Description of Unknown:random_neg_ctrl neg_ctrl sequence
SEEDITSPKVVGNSLIYLYSLPVVRSSARTEPTQLKTPTVLLSLTAKNLGQTTRVNVIGMSPGCGFNAQEIQMIREYGVTIVAW

SEQ ID NO: 44609 - protein, 85 aa, unidentified
  REGION 1..85: note = Description of Unknown:random_neg_ctrl neg_ctrl sequence
WDIIEVYGGIVVLMKKGTANIDTIGCHADDFVSVIRDRKYHNEELDNKKLEELNARGEYTWKQEYHVTTRSGVTLDEEYSVSYPE

SEQ ID NO: 44610 - protein, 85 aa, unidentified
  REGION 1..85: note = Description of Unknown:random_neg_ctrl neg_ctrl sequence
NVSRLHQQRDSPKFIDGYAGGNVGIIILLIENDNKEATFEGDGGNENYLHDVRNEIMDLTSEDIVSRIYETTVIWFLTLWPAEKV

SEQ ID NO: 44611 - protein, 85 aa, unidentified
  REGION 1..85: note = Description of Unknown:random_neg_ctrl neg_ctrl sequence
SKGLVRYNRFVITPRGHVQDFIKEKSGKLKCVTNNDYSSWEADYRELTSNVGISNLKLFSLSLSNATEDYAKCVSKCLTAMNYKQ

SEQ ID NO: 44612 - protein, 85 aa, unidentified
  REGION 1..85: note = Description of Unknown:random_neg_ctrl neg_ctrl sequence
HMPQFGPSANLTMNRVGTRVRGEPLKAREEFSAELYGLGDSIIDIGVKQITNYWKAISSHGNEYPSIEQFNVLTTIGIVWNLGEY

SEQ ID NO: 44613 - protein, 85 aa, unidentified
  REGION 1..85: note = Description of Unknown:random_neg_ctrl neg_ctrl sequence
ESYSVTRPLCEKEIFPYIDCIKAVYIEDNKALIWLLGNSAILPWYMNEVVCSKLLSCEQVFWIVKGSVSDFNLLDGRVPNSNCTL

SEQ ID NO: 44614 - protein, 85 aa, unidentified
  REGION 1..85: note = Description of Unknown:random_neg_ctrl neg_ctrl sequence
EVLEKKDGALGAPKSPQVEDYTCLNSTAAKIYLPIMRITHETKNNDIRIHEDSVVKASILLTGELYRNALETGTLLWSVPPGLKQ

SEQ ID NO: 44615 - protein, 85 aa, unidentified
  REGION 1..85: note = Description of Unknown:random_neg_ctrl neg_ctrl sequence
ARKLWAYCVLANPITTGKAIETQIDDSLTLKIVQGVVYFFKDCNIYTVALVLKLIAMFNLVPCVTINPETSPPRDGDISYADTVI

SEQ ID NO: 44616 - protein, 85 aa, unidentified
  REGION 1..85: note = Description of Unknown:random_neg_ctrl neg_ctrl sequence
HRKWSRDQGSGVTATACDLAYEISGVSYEFPAAIYIDEVRTSERQLQPIWADKLIRVNELPKITKQSDYFQNRQEKMKLTLVETF

SEQ ID NO: 44617 - protein, 85 aa, unidentified
  REGION 1..85: note = Description of Unknown:random_neg_ctrl neg_ctrl sequence
NFGYIAKMDSDEDGVEMLCEINMLSSVVQTTNPHINYLRFETFTGRLKNQKGFFKHMYEDSAFAGTGTFILSIHTNLLYSSNNLL

SEQ ID NO: 44618 - protein, 84 aa, unidentified
  REGION 1..84: note = Description of Unknown:random_neg_ctrl neg_ctrl sequence
SKRFCRGQNPLALNVISSIGNPEFYGTILNENDIMHVFLRQPFLYDIGPRPYPAILKITKPNSVPKGIPSGAILNRLCLDALGL

SEQ ID NO: 44619 - protein, 85 aa, unidentified
  REGION 1..85: note = Description of Unknown:random_neg_ctrl neg_ctrl sequence
VLFVPADLGAISVRFSAARRTLQDAIKLTQNKINAKIRDQALIIKRAAPLIAGSLSLTFRDGAGSGRISNVDTFDDGPAHLSDIK

SEQ ID NO: 44620 - protein, 84 aa, unidentified
  REGION 1..84: note = Description of Unknown:random_neg_ctrl neg_ctrl sequence
GDHSRISYKDMHKKYIKINCLIRGGTIGMFYTLDAQNQQPIADVDKSPEPPFCVDQGNTPLDPYNIENRKEDLFSYLQDKKLGH

SEQ ID NO: 44621 - protein, 85 aa, unidentified
  REGION 1..85: note = Description of Unknown:random_neg_ctrl neg_ctrl sequence
RQDEYKTQNSLTNPIEPSELIFIGNFVLINIKVSIRKAYCNEVAFIGLLSSVKYTDFELNLIVALFSLSMQKRISAAFEQIIRLI

SEQ ID NO: 44622 - protein, 84 aa, unidentified
  REGION 1..84: note = Description of Unknown:random_neg_ctrl neg_ctrl sequence
EKIAYYINPPKEFKQQVILLDTTMHTLDEPVPSSQPLSQLALRAEADDLKMASDKSVSSHKPYHWVGDNDGEVITQITAYQIRF

SEQ ID NO: 44623 - protein, 85 aa, unidentified
  REGION 1..85: note = Description of Unknown:random_neg_ctrl neg_ctrl sequence
WIHEWVHAIRNDREILASEDAVIFFTSIDVIILKILNLNRMSISPVTAIEVGMAVTGFRGIRKMSSDWVGDIHSIHSRYDDIPIL

SEQ ID NO: 44624 - protein, 84 aa, unidentified
  REGION 1..84: note = Description of Unknown:random_neg_ctrl neg_ctrl sequence
KCALGINIPITGSLGYSKWFPPRYPEPKPSPLAEETKMGAGYEFLGEILALYITVYVFLNGSVYFRQFARLEEVKSNWIILFID

SEQ ID NO: 44625 - protein, 85 aa, unidentified
  REGION 1..85: note = Description of Unknown:random_neg_ctrl neg_ctrl sequence
PGIAAETKNDTVSNQLKQNSGLRVKPFASGVELEVNMRDSKICLIEKSLHSANDYELNVKGAPKLDDLPTKINFYEVRSVRFFTN

SEQ ID NO: 44626 - protein, 84 aa, unidentified
  REGION 1..84: note = Description of Unknown:random_neg_ctrl neg_ctrl sequence
IAGNAAMSAGKMNLQYGLEAIITDFYPYQTFDSKTQEKKKYGLIDIKVLRQCGVQADSDGFDSRLVTEMEYVDIFKSYSSSDKS

SEQ ID NO: 44627 - protein, 85 aa, unidentified
  REGION 1..85: note = Description of Unknown:random_neg_ctrl neg_ctrl sequence
PHFKDPDVDSNRRETEKTEKLPNMKGIHEYTHTVANRINSDTMFVQIDFDFHPLIFKRTEPDKSSLRLKQRGIVKMICQIVKGKD

SEQ ID NO: 44628 - protein, 84 aa, unidentified
  REGION 1..84: note = Description of Unknown:random_neg_ctrl neg_ctrl sequence
LEPTVLLLISYHCIQKGERVQPMLLLIVAICLSSLIKELLHDFAEVWKVKVIILTKELLYVHIILVDDIASYMSKKVEDKSTYL

SEQ ID NO: 44629 - protein, 85 aa, unidentified
  REGION 1..85: note = Description of Unknown:random_neg_ctrl neg_ctrl sequence
ATRYSALIENYSTCYTERKKELGKIAEFFAKAVFLLLLEIRTGNAYPLPFYYYDNYLALRFSYTKGVTGLRVMFISKVIIEIETL

SEQ ID NO: 44630 - protein, 85 aa, unidentified
  REGION 1..85: note = Description of Unknown:random_neg_ctrl neg_ctrl sequence
IIITLDGFLYSLAIYVSIYTVLKGSLVDMAHEIDNFMNCQDNELQLPEEGVNQLSELRYSAIHLKKTPLSLAAKVLPIPGLLGDI

SEQ ID NO: 44631 - protein, 85 aa, unidentified
  REGION 1..85: note = Description of Unknown:random_neg_ctrl neg_ctrl sequence
SKKNYVTPYTDSPEGDNVELNTREHGNRYKDNYQNLRTDDYSGIDVESDKVIIIQVIWSNKSYQLGLCDLLRLELLAGLHIQIQV

SEQ ID NO: 44632 - protein, 85 aa, unidentified
  REGION 1..85: note = Description of Unknown:random_neg_ctrl neg_ctrl sequence
RINKKCLVESRVAVVMRNMGNIIAFLSKLDATAILTNIYPSAGPERIPPSINKETSSPATFHEYIDGVNTIEFIILKYYKNILYR

SEQ ID NO: 44633 - protein, 85 aa, unidentified
  REGION 1..85: note = Description of Unknown:random_neg_ctrl neg_ctrl sequence
QGSCQDMYKPVTPNNVADQMLLTIKICIVIVYIQREGNYNLIINWLDDKKLEAIEFIFVVHCYSSYYKDFDDGVGEPHYDVPACK

SEQ ID NO: 44634 - protein, 84 aa, unidentified
  REGION 1..84: note = Description of Unknown:random_neg_ctrl neg_ctrl sequence
LLNFAKELTLERIPHRYWPIVQEHIFSADALMHEEGGVDFDSIEEFPRPFVTEKLLTTIVLFGGFMVILIGGQYIGEVFEKVIW

SEQ ID NO: 44635 - protein, 84 aa, unidentified
  REGION 1..84: note = Description of Unknown:random_neg_ctrl neg_ctrl sequence
KSGRVQERLFLKKDNFVQTNVKPSLSTLANCDLAFFTCLGILLSISLEEFSLPNLLFKTSLEKRGINEAVVDTTGLKKEPGVVI

SEQ ID NO: 44636 - protein, 84 aa, unidentified
  REGION 1..84: note = Description of Unknown:random_neg_ctrl neg_ctrl sequence
VGDNDRLTAGELGKRIRHLKARMIAFEAEFKLATLIVVSKRSYVEGRTLLSAICYQFVTLETMFLILKDSQAKICREKEKVIAL

SEQ ID NO: 44637 - protein, 85 aa, unidentified
  REGION 1..85: note = Description of Unknown:random_neg_ctrl neg_ctrl sequence
LLYSAFCLAFVVYKPRKDVRRPGTFRRTYFILGEHDIKGSGEYPPSIDLTMRAVLLIENADSVQVGREYGEEYQISMETARTYKS

SEQ ID NO: 44638 - protein, 85 aa, unidentified
  REGION 1..85: note = Description of Unknown:random_neg_ctrl neg_ctrl sequence
GILEKAYVPEIDEASRLCWGDYQNSNEKDKIRGTGVKGETAVFRPSVAAFLGAAHLRVSKVPCITNEWESSAVPNLRPYIKSIYL

SEQ ID NO: 44639 - protein, 85 aa, unidentified
  REGION 1..85: note = Description of Unknown:random_neg_ctrl neg_ctrl sequence
LFIPVILSNNREAIVHCSFNKFCVSCVSIPSFDMRLYKRLDIFTLSTDFTVQRFFTRGRQNCATAAGFGKETLYVEDITVKKTEH

SEQ ID NO: 44640 - protein, 85 aa, unidentified
  REGION 1..85: note = Description of Unknown:random_neg_ctrl neg_ctrl sequence
ENIMLPPALSDLKIVTPPEFLAHDEISNMKDVVHGYRALGRVTITPRQFQGSLKNVGKELDKCEKNFQSAVELIVLFHYKISVEG

SEQ ID NO: 44641 - protein, 85 aa, unidentified
  REGION 1..85: note = Description of Unknown:random_neg_ctrl neg_ctrl sequence
TKKDSSIPAGGVKLQGGMFEFVPCGFHSVYKIDTLQVWRETQKILEVEIDKPVTRETKIIDHFSAASATKPKIVIKKIEDKAIDE

SEQ ID NO: 44642 - protein, 85 aa, unidentified
  REGION 1..85: note = Description of Unknown:random_neg_ctrl neg_ctrl sequence
YTDSGIRVPENTTKVVPIIAAGGLLQDRLAQHLGYVSGHSLQVFKPADSIKILRTAKVATEPDGSGRRPLRIVEVFTRVKARSET

SEQ ID NO: 44643 - protein, 84 aa, unidentified
  REGION 1..84: note = Description of Unknown:random_neg_ctrl neg_ctrl sequence
PEVKFKIPDPKLPAKICNKRKGESTNNNCILAVNNASNYQLYCKDSGHKADSFGESESDSFKAEGNKFVTVVAKSHAFASHDVL

SEQ ID NO: 44644 - protein, 85 aa, unidentified
  REGION 1..85: note = Description of Unknown:random_neg_ctrl neg_ctrl sequence
TLDMEQISKKITQRGLTSNTTKIYPKVHAAPSALTLSVPLATRTIFIREKKEIDNQDSATIALGFATLGEGSVRVWKCKRQQITD

SEQ ID NO: 44645 - protein, 84 aa, unidentified
  REGION 1..84: note = Description of Unknown:random_neg_ctrl neg_ctrl sequence
CMQLTMQDYDIIVRDGMSNWYMGFDDIIATDKNIEKSIIFGISKYNSICSLRPEPLCGKMELLDQCGDGGIISSKNLQPKHALI

SEQ ID NO: 44646 - protein, 85 aa, unidentified
  REGION 1..85: note = Description of Unknown:random_neg_ctrl neg_ctrl sequence
NTEHWGRRDRCAAATAQIEALQEESEHRTATKSLITRFPRDTVDMDPKKEKIYYIVGFQKVLNDLDLIVALVIKSTDGVIVPQPR

SEQ ID NO: 44647 - protein, 84 aa, unidentified
  REGION 1..84: note = Description of Unknown:random_neg_ctrl neg_ctrl sequence
RGVNEKQLKKDIQVLPVAILIGIAFLIASEELAEQAPLILSMSCNLEASYSDMYQPVSEYEGIPFFWYPVKQPPHHNCDIALIR

SEQ ID NO: 44648 - protein, 84 aa, unidentified
  REGION 1..84: note = Description of Unknown:random_neg_ctrl neg_ctrl sequence
SNRTGGQLVGDIVGVELKSSGKFAKDRVLIGFPILTPACDICFFQAQWGLTNPMGSLRVSVADKSTIKEFSQEFRTKGYPANTA

SEQ ID NO: 44649 - protein, 85 aa, unidentified
  REGION 1..85: note = Description of Unknown:random_neg_ctrl neg_ctrl sequence
QLPILKKSDVRPNFITGRAYFNNTSDLPYDANIFTDGGGCKNFNMDGFLPFPVEFLKNPRWYIVIAELALTYLDLTGRDESQEKI

SEQ ID NO: 44650 - protein, 85 aa, unidentified
  REGION 1..85: note = Description of Unknown:random_neg_ctrl neg_ctrl sequence
YEILVKTIMCANYKDVDMIDMSDAKCKHIKQYFPAPNSRTESPGFDGENEAAILIETKLIANQIFAQSMALLVADLRDCEKGRKS

SEQ ID NO: 44651 - protein, 85 aa, unidentified
  REGION 1..85: note = Description of Unknown:random_neg_ctrl neg_ctrl sequence
VPPVMVRGDFNMPSDLLDDFVSPIYSMTQSGFPAEDPRLRVLVARIVLPYQVLDINKPTHIGQAGDFYGITNNPLHKKLYCSSDR

SEQ ID NO: 44652 - protein, 84 aa, unidentified
  REGION 1..84: note = Description of Unknown:random_neg_ctrl neg_ctrl sequence
ALYRPIVRNSRFLRMGSPRSKLDKNKTPQAALVAAAEILLLFETSNGIIDQVDKEIARCFVTYVGEDYKPDRKVGCPELNTLPP

SEQ ID NO: 44653 - protein, 85 aa, unidentified
  REGION 1..85: note = Description of Unknown:random_neg_ctrl neg_ctrl sequence
LYLIVYGSITAHGRGCPEPMNKNLIVLDIDKELGIGEYVRDTDEYIYEGDEGLLRNDHRPSFDHEDQKCVFRSEADLSRNGADQV

SEQ ID NO: 44654 - protein, 85 aa, unidentified
  REGION 1..85: note = Description of Unknown:random_neg_ctrl neg_ctrl sequence
TFPSLACLITSLSFILFKYAIVKLGKPSQSYLNAKKQRKTFLGWLFVDLLLLEAIKTLPMKSVDSKLMMHRAVNNNDSVIAYYDA

SEQ ID NO: 44655 - protein, 85 aa, unidentified
  REGION 1..85: note = Description of Unknown:random_neg_ctrl neg_ctrl sequence
IVKKEDSVTLPDAASGGGSLAYGMDFLSFAGLFGDSSRIVSEMADEGVTTGEEKEIYLWCGDISEERGDFKSELHEKHSLKEYDK

SEQ ID NO: 44656 - protein, 85 aa, unidentified
  REGION 1..85: note = Description of Unknown:random_neg_ctrl neg_ctrl sequence
DRLPWLPAGKARYRIRAWVNMLNKPKVYTLSTRHIVTYQVLGLPSIKPYGAAMDTAETSECAKTEFTNPSDDYGGVEGMHLKQAY

SEQ ID NO: 44657 - protein, 85 aa, unidentified
  REGION 1..85: note = Description of Unknown:random_neg_ctrl neg_ctrl sequence
WVWVKKIAPELEFAMFQDTIHIPPLLSGDISAFPASLRPEKEIDRKEPEERAFILRHYNTPELVIMESSADYLVISQRDRSKPYD

SEQ ID NO: 44658 - protein, 85 aa, unidentified
  REGION 1..85: note = Description of Unknown:random_neg_ctrl neg_ctrl sequence
MKFFKPKIRADYSPRKVPTALELGAEFCGDRRGWPEAREDTSLQILELSNVAQCLKTGMVACYNLAPRSSVNRRYGTHNKEGNIL

SEQ ID NO: 44659 - protein, 85 aa, unidentified
  REGION 1..85: note = Description of Unknown:random_neg_ctrl neg_ctrl sequence
IRATATTSTPNYLEEIAPEAEPTTTLSYDANHKIMTVEFGHNAVYGYYETYKPVNATVSWNPFAKLNKDEVKLVVLVVKTFFDID

SEQ ID NO: 44660 - protein, 85 aa, unidentified
  REGION 1..85: note = Description of Unknown:random_neg_ctrl neg_ctrl sequence
LSTQMGLFLRMFDRIENGMWDKEWNIEYLNLFKSPSMILLAKIDKFVPEMAPGNTEPVFDVNSTGHNPFKFMGNALSLLGSSLME

SEQ ID NO: 44661 - protein, 85 aa, unidentified
  REGION 1..85: note = Description of Unknown:random_neg_ctrl neg_ctrl sequence
HEYREVDQPSKTNLNLTLNSTLSMIKQNLLKGDKLWITVEETAADLMPWGIGFLQVSYLLTLPSFKSKLFFIAFIYGSVNEKIEA

SEQ ID NO: 44662 - protein, 85 aa, unidentified
  REGION 1..85: note = Description of Unknown:random_neg_ctrl neg_ctrl sequence
ETTCVIIYQREDLKLAKNCEIIKLGFGPLLSTTSNGPSSLSGEEYPKLDYLEGGAVGGKLVDFMLGRLVNIDVNKVAADNLALEE

SEQ ID NO: 44663 - protein, 85 aa, unidentified
  REGION 1..85: note = Description of Unknown:random_neg_ctrl neg_ctrl sequence
KNYRGNEFLALFDWFGADEGNEQRPGAAAKPRTCDLFAGTYLSYPPHELAFKNFTYIKITVCALTVLFEKRLECKSYVLSGYYIL

SEQ ID NO: 44664 - protein, 85 aa, unidentified
  REGION 1..85: note = Description of Unknown:random_neg_ctrl neg_ctrl sequence
IWAKMKTNEEIPRSAILRYESEAEEDGKVELNLARYDKAEYKIHLEREEGDIAKLRKQKYEMKDLKNERTYGKERDIKAPSIDDK

SEQ ID NO: 44665 - protein, 85 aa, unidentified
  REGION 1..85: note = Description of Unknown:random_neg_ctrl neg_ctrl sequence
VFQDSASYKTNYPFGTLRDSGNLFSLGAQERYHVGTTSMDDTTIVIKVDKMKVGLGPILFKGVFTYSKVITILARDPFLAYGRII

SEQ ID NO: 44666 - protein, 85 aa, unidentified
  REGION 1..85: note = Description of Unknown:random_neg_ctrl neg_ctrl sequence
SEEFERATSIEWVDAALATFKAIAEETTSKFASDDISLYWPSSECYLQIVTGELEGELAQADTSGGVLCNCKLSLDDPCISNKMD

SEQ ID NO: 44667 - protein, 85 aa, unidentified
  REGION 1..85: note = Description of Unknown:random_neg_ctrl neg_ctrl sequence
APDRQESLPDEIDKYSKSKYKVGLLSPQYKSDGNDEFYMLEYFSSDESLWKVRKDLSTDSYIGKTVYGVAVSAAQLSVIIYDSPD

SEQ ID NO: 44668 - protein, 85 aa, unidentified
  REGION 1..85: note = Description of Unknown:random_neg_ctrl neg_ctrl sequence
TYEQDKTEEAEILADVPFHMITTMMHLGCDLEKLLTAFGILKRPLHIRKFDPSVLLNLITKVIVKPIQGPSKEWIYVHVEANIKY

SEQ ID NO: 44669 - protein, 85 aa, unidentified
  REGION 1..85: note = Description of Unknown:random_neg_ctrl neg_ctrl sequence
SNISETADFRVLRRVAHKNMGYSVVKIREALVFVPPTVDYQKLYSLTIGRVHIPPMSTIAEEDGNEPSVSLYVDVYKFSEICTKE

SEQ ID NO: 44670 - protein, 85 aa, unidentified
  REGION 1..85: note = Description of Unknown:random_neg_ctrl neg_ctrl sequence
PLGIYVILFEENGLHKVGKYGKWYECFAMGNRLAPDIIAYETFKIGLEQVTLIIIQLSSFFETETVWKIGLVDIICYPTEGDADT

SEQ ID NO: 44671 - protein, 85 aa, unidentified
  REGION 1..85: note = Description of Unknown:random_neg_ctrl neg_ctrl sequence
AKRGGVKPFYLERRFSVTSVLRNITESTYFGDLQLMAIGDRTLIAPAPNIELILHVPRALLVGKNQSIHENKYKGAEWSLDTKVH

SEQ ID NO: 44672 - protein, 85 aa, unidentified
  REGION 1..85: note = Description of Unknown:random_neg_ctrl neg_ctrl sequence
FAKTVTLAMLPFWFMGLALVNASDNKKAQPCAKNLASGIILAKYYDKKVASDKGSISRVSNKEALPYMTPVALARAEMTINYKGE

SEQ ID NO: 44673 - protein, 85 aa, unidentified
  REGION 1..85: note = Description of Unknown:random_neg_ctrl neg_ctrl sequence
CLNLEGHETLYSDPPLPTYWVHVKIGPVTKLEINKFTVKLAEGWTPHMSFSPENEASSGTALDKFNRNLGEEYLYSAYEWSAELY

SEQ ID NO: 44674 - protein, 85 aa, unidentified
  REGION 1..85: note = Description of Unknown:random_neg_ctrl neg_ctrl sequence
DGEDPICRDFYSAKQINYREYEYENSCSEIMVYDIAILLADGFPKGFLQGEVQAAPTFGNKIFKYIVDKIETGIEWKTIDTQTLE

SEQ ID NO: 44675 - protein, 85 aa, unidentified
  REGION 1..85: note = Description of Unknown:random_neg_ctrl neg_ctrl sequence
AECLRFKRFADNVSASPNKRFHHTVHIKCLVEISSLLYDKSPIRDHGIMENIKACSFNAKVKVVLRLILRRQQIGVENIFPTKIK

SEQ ID NO: 44676 - protein, 85 aa, unidentified
  REGION 1..85: note = Description of Unknown:random_neg_ctrl neg_ctrl sequence
EIEEVRLLYKPSHNCNELCLSVLDYKSTSNQTKAQDRTLGWFSASPEYELYIMKLMYSTFGKDLDQSSVKLIQIKMGKNLLVSNA

SEQ ID NO: 44677 - protein, 85 aa, unidentified
  REGION 1..85: note = Description of Unknown:random_neg_ctrl neg_ctrl sequence
KSDLPKKDMLEYGFINSGLPVPLVMKFVPAGTKSQPGARHIKYIIALNYSREMHIFYKKENLSVTPTTVIDKLKPCDAVHEAIFS

SEQ ID NO: 44678 - protein, 85 aa, unidentified
  REGION 1..85: note = Description of Unknown:random_neg_ctrl neg_ctrl sequence
LGIIDLANSNMRIINKSFDEKEVTVCVLELLRAYREMGPNDLATITPDGRVPIGFLKLEVIIVPSFMSNAMDAYCPSYKAIYTFN

SEQ ID NO: 44679 - protein, 85 aa, unidentified
  REGION 1..85: note = Description of Unknown:random_neg_ctrl neg_ctrl sequence
VYVVPMYTSAPPAKFKDQPNHSILPVKISDDRGAGSKSSEAYNSYKVFLEIEIAKKTMGPDLNAPANPFPGRVVVVMKAKFILFE

SEQ ID NO: 44680 - protein, 85 aa, unidentified
  REGION 1..85: note = Description of Unknown:random_neg_ctrl neg_ctrl sequence
NFGPNIPLNVSVVQVFDRFRTKCDHIIDKVDNSNKSRVGKTPKKSHSHHKTQSHKVCAECLDSDRNKGFSIYLDVGLTQELAQVK

SEQ ID NO: 44681 - protein, 85 aa, unidentified
  REGION 1..85: note = Description of Unknown:random_neg_ctrl neg_ctrl sequence
NVKAPNILFKNIVVYRLKNIAIKADNVTLPSGVTAMPNFRLAITVAKSSKEKSSKDNRSINLRKLIIECEYSLNTCPYTPTNNLD

SEQ ID NO: 44682 - protein, 85 aa, unidentified
  REGION 1..85: note = Description of Unknown:random_neg_ctrl neg_ctrl sequence
MILKGTFGSIMPTIISRASDTCAYPPSVNLVDKLQTISSIIVNGVKEYRFDNVNNAYSKFGSTFLQNYVGYERTPVMYKEAYNKT

SEQ ID NO: 44683 - protein, 85 aa, unidentified
  REGION 1..85: note = Description of Unknown:random_neg_ctrl neg_ctrl sequence
CSLIFLPRQVFSSRMSDETKGLITMGVVAATIIRVTTGAVEPKSSKIHSYYKNDINESKSVEESRSLGLPILYSRTVIEVYLGAY

SEQ ID NO: 44684 - protein, 85 aa, unidentified
  REGION 1..85: note = Description of Unknown:random_neg_ctrl neg_ctrl sequence
KLFLSFTSVNMLDITMVYSGKWYMSYWNGVPSIITQQERKGKVCIISKLQYAFNFEGPYGGSSPDGITKTEIIYETAIDLAGLTY

SEQ ID NO: 44685 - protein, 85 aa, unidentified
  REGION 1..85: note = Description of Unknown:random_neg_ctrl neg_ctrl sequence
HCVPTLNFEGWKKRKLVTEIQGSYIKHPKGNRHVRNEREDYADPYDSDILVIGLDLTLTRYTCESGEESTIRCISNPVVVLGYTP

SEQ ID NO: 44686 - protein, 85 aa, unidentified
  REGION 1..85: note = Description of Unknown:random_neg_ctrl neg_ctrl sequence
AVTAKQEKRIKDLKKVCGEVDCLPAPSEGRLVLWRHCREPLIVYDGLLLKHGNIVPKPLICMVEDLTLTTQVIEDRFIKIIWISF

SEQ ID NO: 44687 - protein, 85 aa, unidentified
  REGION 1..85: note = Description of Unknown:random_neg_ctrl neg_ctrl sequence
LKIPCTENFWSTRKKYDHSNDPAGSEHRGDLKKNKYDLKEPEARTASFVSAELPKAELMEVSVGDRVRIVINLEGEPHIVSVVEL

SEQ ID NO: 44688 - protein, 85 aa, unidentified
  REGION 1..85: note = Description of Unknown:random_neg_ctrl neg_ctrl sequence
LLDKGHPCLNSQERRWNEILLALKESPVYNHDKSIYLYEHIKKVRSILKARLKLLLTFLHLTSWENPKKPKRKTCSKENLEAIEL

SEQ ID NO: 44689 - protein, 85 aa, unidentified
  REGION 1..85: note = Description of Unknown:random_neg_ctrl neg_ctrl sequence
FLRPTASYILQISAKVETLSLLLVGSGVLVVSLLVAETGYINIRNILKLERFSRKVKITEAHTPIYVYIIKVLILRIGGDKRGIQ

SEQ ID NO: 44690 - protein, 85 aa, unidentified
  REGION 1..85: note = Description of Unknown:random_neg_ctrl neg_ctrl sequence
RYMLYHKVVEKNVQFWSIHKKSEGFDGIYNLIPTFASESIPRDLYQRAPACYADFRLDPSGGHKLTALDTAGEDLMRKAELRIGP

SEQ ID NO: 44691 - protein, 85 aa, unidentified
  REGION 1..85: note = Description of Unknown:random_neg_ctrl neg_ctrl sequence
RIAYVGSYINAAPGVKGHRYVGNILIILMSELFYINPSLEYLSVILSRDDFCDVNDMIKVKIVLGDRFKSDYDGPNQLDKSIWNP

SEQ ID NO: 44692 - protein, 85 aa, unidentified
  REGION 1..85: note = Description of Unknown:random_neg_ctrl neg_ctrl sequence
KMRKIIRVYNDKNIQRSKVLLLVSSDQRTDTWYLHVIISLQADKVQGLGCSVFWAAIISEIALSGTDPYADESLQPVPESSAETK

SEQ ID NO: 44693 - protein, 85 aa, unidentified
  REGION 1..85: note = Description of Unknown:random_neg_ctrl neg_ctrl sequence
SGKPGLAYRIGPNTASGETLKCLVEESEPPHPEIYKGEKLTANLVYENFQNSQQGKTKLTAPVKIDKRVQIQLTTFLPRIERKLV

SEQ ID NO: 44694 - protein, 85 aa, unidentified
  REGION 1..85: note = Description of Unknown:random_neg_ctrl neg_ctrl sequence
IVLGSTRKPIAVVIKETLFCLHYGSQYGADFEGNYIYKAMIYCPLSYLLAKLNFSGVRVQFHECSEDAFYGYNPLFINVMTIIIG

SEQ ID NO: 44695 - protein, 85 aa, unidentified
  REGION 1..85: note = Description of Unknown:random_neg_ctrl neg_ctrl sequence
FFHPLMTPLNLKAIITLANSESIRGMYRFIWDVTYSKAFVNAAIIARKTLKLYILNLIAKLVKAVSIAIEYVKTLTRYDKTFLEA

SEQ ID NO: 44696 - protein, 85 aa, unidentified
  REGION 1..85: note = Description of Unknown:random_neg_ctrl neg_ctrl sequence
SLHLTYGMCFRSSPGGKIELGTRDVDPESVIEDYYGGFFDDMTITFDLRDKYNRMGFKNSNSFCTEQSTRLSEFGKVDDHITSLI

SEQ ID NO: 44697 - protein, 85 aa, unidentified
  REGION 1..85: note = Description of Unknown:random_neg_ctrl neg_ctrl sequence
SILREIKALTVLTVKAFWLSMPERVNGVLRIEGAYEARSFIFHNKILKSSSIAVGKIDITLIIKPKVNKLDTIGGSWIGKLKSTK

SEQ ID NO: 44698 - protein, 85 aa, unidentified
  REGION 1..85: note = Description of Unknown:random_neg_ctrl neg_ctrl sequence
CWSDVGQFASFEGVINAGIYFSVDGMLNEEIIFSGDEKVQSISYTAVKKASSAIERLYPLKSEDPGPIYRQIQFVLLSAFRNIKS

SEQ ID NO: 44699 - protein, 85 aa, unidentified
  REGION 1..85: note = Description of Unknown:random_neg_ctrl neg_ctrl sequence
SDINGLIVMYAEKFFVLDQGTTDRDVPPLFRNFIRSVCANYLNRIGAIDLTSPNIRFDTELQQMSPLIERDVELSASKLYIDGKA

SEQ ID NO: 44700 - protein, 85 aa, unidentified
  REGION 1..85: note = Description of Unknown:random_neg_ctrl neg_ctrl sequence
RDKKTFGLHGKSENAPVLRIDIVFCGEDIIFPIIRDPERLWPSLYNKGIATKEVLSPRHNLAESFVPKDYEISGKSQPGDSWKYV

SEQ ID NO: 44701 - protein, 85 aa, unidentified
  REGION 1..85: note = Description of Unknown:random_neg_ctrl neg_ctrl sequence
ASTSIYQILQGSSIQSPDESTFTVEGQCIVVIQIRRLNEEAAYEYREFQAHYGLLRVPGPTADAKKKQLGEISAGAVSFASYLAG

SEQ ID NO: 44702 - protein, 85 aa, unidentified
  REGION 1..85: note = Description of Unknown:random_neg_ctrl neg_ctrl sequence
LQEITPCRHMNYMFEKDDECSDSMIDMGKGVGAGNLFIPVLKRKIAELMVLAKTVIVANSVHILSEDKYDNDFMRAFKYNCWSII

SEQ ID NO: 44703 - protein, 85 aa, unidentified
  REGION 1..85: note = Description of Unknown:random_neg_ctrl neg_ctrl sequence
LQLQEFKTSLSLEISMSDITNKNCMNLISFSVGKLMGVVLKKSARIYPSAEFVLAFGAPAENPAANCIVKISKSTDLYKAYPNLP

SEQ ID NO: 44704 - protein, 84 aa, unidentified
  REGION 1..84: note = Description of Unknown:random_neg_ctrl neg_ctrl sequence
IWKVDIVQIAQCLFKLDNDTFKFSSKSRNIISTLGTNSVPIRDFKVSWAQVTTITRERYDYRGLFYLKKPSSSVRAFSEFFLAV

SEQ ID NO: 44705 - protein, 85 aa, unidentified
  REGION 1..85: note = Description of Unknown:random_neg_ctrl neg_ctrl sequence
TFNESVHGITFGVQFRAGYVPPTTKLSDPAYIALRQMQSLTALKLLVVADLLQHKKENPVTSYGAATLESAGLDPLLALVFTSTP

SEQ ID NO: 44706 - protein, 85 aa, unidentified
  REGION 1..85: note = Description of Unknown:random_neg_ctrl neg_ctrl sequence
ANSVTPTEAGGLKVNYELQLNDYAYAYEIGLYKEPRYELVINESAYMPGNVVIEQYRFMIGYWVDGIVSLGKSLCLFSNDIPNQP

SEQ ID NO: 44707 - protein, 85 aa, unidentified
  REGION 1..85: note = Description of Unknown:random_neg_ctrl neg_ctrl sequence
IDAAVVISRLKIRNISFCEISGITLLLNDRIQYLLLITQFAPWTLSPLVDGVTPYEDCIPTTEGVNYNIEPAKPGSETETVLKGS

SEQ ID NO: 44708 - protein, 85 aa, unidentified
  REGION 1..85: note = Description of Unknown:random_neg_ctrl neg_ctrl sequence
ERNREGNRNTIPGAGIDALYSSQMLTICYSANLIEDAVLTLDFIILIKFFVCLIDEGYIDVSPVTLISGGKEISNLFGRGLVDIR

SEQ ID NO: 44709 - protein, 85 aa, unidentified
  REGION 1..85: note = Description of Unknown:random_neg_ctrl neg_ctrl sequence
DYDHESVHSCWKAKAAVYLYVSRTVRYKLVKIPKDSKEVKEVFGSDLSPTEFKKYLGYEKTSMLSQIIKSPRSYVIMSPSILYLM

SEQ ID NO: 44710 - protein, 85 aa, unidentified
  REGION 1..85: note = Description of Unknown:random_neg_ctrl neg_ctrl sequence
TTKPTEPIYDIEGKLIMSKGKSLFTEVEIVIYISFIMGDKISPFKFIIKILYTYMSLGASYERKPFTYNGVLNAIVVIVSFLNVI

SEQ ID NO: 44711 - protein, 85 aa, unidentified
  REGION 1..85: note = Description of Unknown:random_neg_ctrl neg_ctrl sequence
CYDPGSIKKLRIGVEKPGFKTILLSSGALKVKTIYDVVYPITAIMRLTEGSKIIDMGGGFNREAFVERELKVPIETVDHYNANHY

SEQ ID NO: 44712 - protein, 85 aa, unidentified
  REGION 1..85: note = Description of Unknown:random_neg_ctrl neg_ctrl sequence
PAPKIVSLPADIEWRALRPQEPKLEIALSLAARFIQPGGNPINYDLKTEFHSCIDVDFPEILYGLEVDRVKFAVKSYDIINQNLN

SEQ ID NO: 44713 - protein, 85 aa, unidentified
  REGION 1..85: note = Description of Unknown:random_neg_ctrl neg_ctrl sequence
SLQNILTCLDEGPNYDLTQRNIEQTHKLMVIPVIWPKTVKATCYKYYTLGRDNESTIILQEQAPYFLLGTVKYYPHVVEGLLSPL

SEQ ID NO: 44714 - protein, 85 aa, unidentified
  REGION 1..85: note = Description of Unknown:random_neg_ctrl neg_ctrl sequence
RLSYGYLVKVFMGRLNAIVTYFTPTTSDAKYLSNNYLAFVDGLSTKILVLQKKLVDILISSYHHINTSKGKSWVDKNYEGAGPDS

SEQ ID NO: 44715 - protein, 85 aa, unidentified
  REGION 1..85: note = Description of Unknown:random_neg_ctrl neg_ctrl sequence
EGLGTKSGIPQEAAAGDLVSMPISRKLLTRRQYLVNHKSKAHISINTSVCEWECTFNTNRTHGLSCRLWPRAIFGILFLDSIDMT

SEQ ID NO: 44716 - protein, 85 aa, unidentified
  REGION 1..85: note = Description of Unknown:random_neg_ctrl neg_ctrl sequence
ERPYQLEQDITLGDIEYLLSKTIATLRIKLIIKEVNIPMNQKNDLYVAQTGTEGSYPAEHCSEVNRAKEVIKPNGIGRTVDYELA

SEQ ID NO: 44717 - protein, 85 aa, unidentified
  REGION 1..85: note = Description of Unknown:random_neg_ctrl neg_ctrl sequence
SNSEDIEIFIYCLLTFPYGRNFPTSRAISNKESLDHQAFDIGSIATNVKCVMPDQYSKVRTGKKARNHFPYLWVKSDSRAKKNTA

SEQ ID NO: 44718 - protein, 85 aa, unidentified
  REGION 1..85: note = Description of Unknown:random_neg_ctrl neg_ctrl sequence
YHIIASAGQSEYGASEIGVPAAYKRYDKALETVIQGKSLSDSYAETNDYLILFGSYANCAKSTNRKSILVCLSHCPKNFIGMESK

SEQ ID NO: 44719 - protein, 85 aa, unidentified
  REGION 1..85: note = Description of Unknown:random_neg_ctrl neg_ctrl sequence
KMVTHVLFSKSNKASGLLAVEMHTDTWIDMHEESYADYGELGSQAFYCIVLTFSPTLRLAVLIGNNKKSIILIYVVFCLKNKAEL

SEQ ID NO: 44720 - protein, 85 aa, unidentified
  REGION 1..85: note = Description of Unknown:random_neg_ctrl neg_ctrl sequence
PAYFILLRICNGKDNFPAVIYSSDLLKGRVVKFNQDLIRKTDSFVDCTHSIYKSLERIVAFAPFELSDRWFNISKWLKNSMELII

SEQ ID NO: 44721 - protein, 85 aa, unidentified
  REGION 1..85: note = Description of Unknown:random_neg_ctrl neg_ctrl sequence
IRKKPLMGQILIVLESAKKNSIANNHYIKYESVILYEANQASKLLRIEALLSAIKYLAHKTEPAPLKSYWFIWSLIVLLGLIICG

SEQ ID NO: 44722 - protein, 85 aa, unidentified
  REGION 1..85: note = Description of Unknown:random_neg_ctrl neg_ctrl sequence
ENKITHHADHRTDSTRANGGFRCMFHELITRDTTFQLEELELGQYITQIHYTSVGWWCSDILHPMEKRDEGDFLLLFIEGVAILE

SEQ ID NO: 44723 - protein, 85 aa, unidentified
  REGION 1..85: note = Description of Unknown:random_neg_ctrl neg_ctrl sequence
CDRFANLNIVDSTEAGSKIDKYIGTRKRILKQCQEIGHLYGLFGLRVVRGALDDMEGSSNTLNIIIVKKGARLKTRSNLPNNFIV

SEQ ID NO: 44724 - protein, 85 aa, unidentified
  REGION 1..85: note = Description of Unknown:random_neg_ctrl neg_ctrl sequence
SQLGVKFLVMVISENDYNQTGYRTLIRPIIGFLTVVDSGASIGITFDSPNETEVMEWQQGIDYIYINIASKGGQRAVTEFEFYRY

SEQ ID NO: 44725 - protein, 85 aa, unidentified
  REGION 1..85: note = Description of Unknown:random_neg_ctrl neg_ctrl sequence
NDMLIEAYKGPGSAGPEYPDLVNRLIETHSLEIGQILVEKNSNRRFYPRSFVIRNYYGEKAMVSGWGRGTQFIIQMKGYPDFIFT

SEQ ID NO: 44726 - protein, 85 aa, unidentified
  REGION 1..85: note = Description of Unknown:random_neg_ctrl neg_ctrl sequence
PIRPRYYIIEACEPWVGLKEHMVLYTSGKEDIKMLLSVWLKKNLSVYEAAYIARINLRTDLSNSPKIVDNTSGINYKSIAFERKQ

SEQ ID NO: 44727 - protein, 85 aa, unidentified
  REGION 1..85: note = Description of Unknown:random_neg_ctrl neg_ctrl sequence
QLTSPETRDLNPHTINGTEATRPSFFEILPCTWKKVLNLFTIVISEGGLIDAGSILEATSSTANVSEGSFFDLEYHAKSELPDED

SEQ ID NO: 44728 - protein, 85 aa, unidentified
  REGION 1..85: note = Description of Unknown:random_neg_ctrl neg_ctrl sequence
GNEVYLGSSTDPMKGLASFHSETRFEYFALGRNDIISNVKAKKQMYEENYIIYTKRFLHGSAHERQRITRIDGHILIPGLGDETT

SEQ ID NO: 44729 - protein, 85 aa, unidentified
  REGION 1..85: note = Description of Unknown:random_neg_ctrl neg_ctrl sequence
LGIETILNIPQCTNNGDQSVLTYKEKLSLGGTTLEIRKILKIREVLDACKPKNPLLSVLTLNKGISHKDWNSLGDISGYETLGYR

SEQ ID NO: 44730 - protein, 85 aa, unidentified
  REGION 1..85: note = Description of Unknown:random_neg_ctrl neg_ctrl sequence
SGCYPGFQTRLTGEKDMCPKIGSILFNPAISALTHTLVNTPSIKISREMKTTALAINKERIQTMKLEVMTVNSTEWQSVGIYFQL

SEQ ID NO: 44731 - protein, 85 aa, unidentified
  REGION 1..85: note = Description of Unknown:random_neg_ctrl neg_ctrl sequence
NNADRHENNGTHAKNKILYGIVLEIRVQDKDRSMKSNNPRYLTEKKGASQSGKIHIDNPVEEKYFKLIKCAACNDRQNQSLARVG

SEQ ID NO: 44732 - protein, 85 aa, unidentified
  REGION 1..85: note = Description of Unknown:random_neg_ctrl neg_ctrl sequence
LILEMFVPLQGPRVAYKLFTEYYDGHAFGQPFDTFGGEGRINKPQYVNLDISKYITERGESGTQHIMYRPYMYDGSELGKNEYKK

SEQ ID NO: 44733 - protein, 85 aa, unidentified
  REGION 1..85: note = Description of Unknown:random_neg_ctrl neg_ctrl sequence
EYIFYDLSSDTIELDKETDAHASANSVTFTLKQFGMDKIIFGSAGGELSNLKDAHPTDCEDSHMKPTDDRLFRAEDLDKLPKNIT

SEQ ID NO: 44734 - protein, 85 aa, unidentified
  REGION 1..85: note = Description of Unknown:random_neg_ctrl neg_ctrl sequence
LPYPQPSLFMFATELIEILLILVPPGLTYKEGIASDLAEVDRVRRFDDDFGIFNSLKFIIGSVNVSLVGPPNAHVKPAVRNRCMK

SEQ ID NO: 44735 - protein, 85 aa, unidentified
  REGION 1..85: note = Description of Unknown:random_neg_ctrl neg_ctrl sequence
SVPKDKDVHLEGAPNFVKNGQDGLKYLLPPEVNYEIHNFEERPKLFDHSQTWYRNELIKAGVSGGATFQIDKTETIVKGYTYRVA

SEQ ID NO: 44736 - protein, 85 aa, unidentified
  REGION 1..85: note = Description of Unknown:random_neg_ctrl neg_ctrl sequence
EMKEADTGEEQITRNVQQHWYELAKYYNSIAKEKPTSSIVLKPPANPTESLEEPIKKLNKYALMSEVFILCADKLQKKSNYRTLD

SEQ ID NO: 44737 - protein, 84 aa, unidentified
  REGION 1..84: note = Description of Unknown:random_neg_ctrl neg_ctrl sequence
CAQNYLVKDYDAKDRLIGFGKLEGDDVRREVDSGWDRLASKLNTAMKTLDFGAGQSLKCLMAKITRTQPILPHLKCTDFGLAVK

SEQ ID NO: 44738 - protein, 85 aa, unidentified
  REGION 1..85: note = Description of Unknown:random_neg_ctrl neg_ctrl sequence
LNNRSSIRHKMYIDLILMQNVLVLFEIQIFLHMDYSYTEQWVPYIAVRPLVDIYYPNYAELARRNNVMYMGDGTKAWDKIMKGDT

SEQ ID NO: 44739 - protein, 85 aa, unidentified
  REGION 1..85: note = Description of Unknown:random_neg_ctrl neg_ctrl sequence
LLLDRNSHLTCHIIKVNKLVVSAYSFINQFQKSQAQDCVEDVFDQWVINALLVTTNGGDAAAIFKSAQEGNSEGISDHWLHMDDS

SEQ ID NO: 44740 - protein, 85 aa, unidentified
  REGION 1..85: note = Description of Unknown:random_neg_ctrl neg_ctrl sequence
SPDLKDCTSLEMGEQEGDTFFRICEECPDLVPDYAVVISIFYPKKISDISDVDDYGDIVPGGTFYRLEGYGIKVPRRTITNFEPG

SEQ ID NO: 44741 - protein, 85 aa, unidentified
  REGION 1..85: note = Description of Unknown:random_neg_ctrl neg_ctrl sequence
EKCSDEIQDKNVDLFKFRNAVTVAYHITVIVAVTMKEKPFLDENLVRSFWVASSSVQNSKNRASANRGYKIYRPPGTGNGNLAFK

SEQ ID NO: 44742 - protein, 85 aa, unidentified
  REGION 1..85: note = Description of Unknown:random_neg_ctrl neg_ctrl sequence
TNALLETDILSFEGFQFDADLSIVIKNGNGLLGEHLRGVTLRTFGWLNKSTGPVAAAGNFNAGLRQENYKERPVNFFSSTNVIDH

SEQ ID NO: 44743 - protein, 85 aa, unidentified
  REGION 1..85: note = Description of Unknown:random_neg_ctrl neg_ctrl sequence
SGEWVINSGMRAIEDFVIINLFAVNRRSGVDGQLDAQMGTRTTKARYIPFIEAAPMWHFYLSNTYHFMNVDMHDETLRHMRPGLG

SEQ ID NO: 44744 - protein, 85 aa, unidentified
  REGION 1..85: note = Description of Unknown:random_neg_ctrl neg_ctrl sequence
VQCVYEIILRILGTYIPAPETVNACMILEKSFQINTDVALSVVYNIDGKKDRKGIVTYDMGVDNTHIENYEKEDKFLRGSISDFM

SEQ ID NO: 44745 - protein, 85 aa, unidentified
  REGION 1..85: note = Description of Unknown:random_neg_ctrl neg_ctrl sequence
NVIEDKTLAHVKDNLSGVLIGIVELMSIYPPPNVILGLGNMRPESEEEDTSNTEAAVCAQYGLTFMIVSSDDHWIHSPQYRILWE

SEQ ID NO: 44746 - protein, 84 aa, unidentified
  REGION 1..84: note = Description of Unknown:random_neg_ctrl neg_ctrl sequence
IMFGKKRSSCRGQNLFYIKKTLPVKSINVLVNGTMDLPELLKHEGSSPNNVGDQIGLAIEKFKWVTNDGIVYTTLQQDDEDVRF

SEQ ID NO: 44747 - protein, 85 aa, unidentified
  REGION 1..85: note = Description of Unknown:random_neg_ctrl neg_ctrl sequence
TTELTKLFVEPAVELLPAKAFKSDIDRLIILRLNRLVAEYEYPYLLSMNLCILYKSSSVMALLSRYFTGMGVRKMCINRKFYENR

SEQ ID NO: 44748 - protein, 84 aa, unidentified
  REGION 1..84: note = Description of Unknown:random_neg_ctrl neg_ctrl sequence
IGFVSYDLKHPLQQTCYDLVWKHYTNTALNTTFIMYAVLSLFGAAGHRGKFKYKDPLEYISFKMDHRQFLLMVGEANQRRHFRC

SEQ ID NO: 44749 - protein, 85 aa, unidentified
  REGION 1..85: note = Description of Unknown:random_neg_ctrl neg_ctrl sequence
PWGFARSVAPEKQSLLKDNLSQTYEIREFDQKIKGGYCLHMAKILKLYFNDDIFPTDFGWIFNVTLRLDYMGWINFSEDWAKYRS

SEQ ID NO: 44750 - protein, 85 aa, unidentified
  REGION 1..85: note = Description of Unknown:random_neg_ctrl neg_ctrl sequence
WSILYVLLCADVSSASAKFEHSPIATSAVPVFIAVNVAESARKDGAFPVVIIKNGQLGVTCIAHMLDMHSNLESAPLLHLAKAVK

SEQ ID NO: 44751 - protein, 85 aa, unidentified
  REGION 1..85: note = Description of Unknown:random_neg_ctrl neg_ctrl sequence
VLYGRVPYLEGAINLYLVSIYKKPIVYSEYRGTVKSRSHLKEISYSFAKKQAIHLVTKILQTCMGKEKGGKLTIRYKAILILAAS

SEQ ID NO: 44752 - protein, 85 aa, unidentified
  REGION 1..85: note = Description of Unknown:random_neg_ctrl neg_ctrl sequence
IAASHNSTSGSFICKDRAKGDTNAVPERCIKWDIGTHLSIEFTVTKHTDYKDNDYAIGIDDLFNLSYGFAKAKEVCRHENFDNSA

SEQ ID NO: 44753 - protein, 85 aa, unidentified
  REGION 1..85: note = Description of Unknown:random_neg_ctrl neg_ctrl sequence
QTYEVTPNVVIGKSEGRGLLHMENRKFVEESEIMGDDSRAIQTVNLQTQHASILMNDELLECKHMRETRFLMTSNIMTQVDRASI

SEQ ID NO: 44754 - protein, 84 aa, unidentified
  REGION 1..84: note = Description of Unknown:random_neg_ctrl neg_ctrl sequence
EYLRLFLKCKIPFTIWISKAPNYTLWNGNKYLDFLIYLGTGSYAIKGDETSKNKNSRARILKTYRCLIISIRNFFQYEYEKSKK

SEQ ID NO: 44755 - protein, 85 aa, unidentified
  REGION 1..85: note = Description of Unknown:random_neg_ctrl neg_ctrl sequence
AYEIFWTREIKSIKEASICITVVFKGDILLNPPGDSKSDLKAFRKLRDIIEVTIKIPSKVMEGKMSRNRIKMEFLNILLSLGGND

SEQ ID NO: 44756 - protein, 85 aa, unidentified
  REGION 1..85: note = Description of Unknown:random_neg_ctrl neg_ctrl sequence
FLLNLVQQVLKNLNETKSIAKSVKEWYQDIGMGARVVKPRVILPQLDESTKAYEKKSMSTRISELGIARDYFLYDPIIVLSTIRE

SEQ ID NO: 44757 - protein, 85 aa, unidentified
  REGION 1..85: note = Description of Unknown:random_neg_ctrl neg_ctrl sequence
ELDVYYKHPMFNFYYKIRMQGQGIPLRLTDKVNQNTALLIHRFVEEATSVARTPGEENPPEGVHFSVNERKVADDCLKINHKDTG

SEQ ID NO: 44758 - protein, 85 aa, unidentified
  REGION 1..85: note = Description of Unknown:random_neg_ctrl neg_ctrl sequence
CRNLHADTDVGIDVVVNLCSKYVVYETVPMGATALKIDIALLFNKIVPSRRDNSVRFVKAPKTEKNVLNKASQIMRRKYSPMVGI

SEQ ID NO: 44759 - protein, 85 aa, unidentified
  REGION 1..85: note = Description of Unknown:random_neg_ctrl neg_ctrl sequence
NLYAQSYYHSGGERIDGCSNMSIMESMISNRCFAYDVHLELCNHIVVIHFHPLNKACNAIQCTFPCLFSSSFRLYSLTGLWWESD

SEQ ID NO: 44760 - protein, 85 aa, unidentified
  REGION 1..85: note = Description of Unknown:random_neg_ctrl neg_ctrl sequence
LHGGIVVFLVIVLINFIIAGKANSKCGTSNANSAILNDTSADWFQLLIDFAEVYQPFYDISLFYIIGYYRATAILAIREVVIKEV

SEQ ID NO: 44761 - protein, 85 aa, unidentified
  REGION 1..85: note = Description of Unknown:random_neg_ctrl neg_ctrl sequence
VNTEQCISSMLLGEKHLDITYSEHTRPIKDTIDILIDPPRAYTKREKTFDALFLNRALCKIFEPLESLDNRKKRNVNGICWRQKF

SEQ ID NO: 44762 - protein, 84 aa, unidentified
  REGION 1..84: note = Description of Unknown:random_neg_ctrl neg_ctrl sequence
VEQAERLPIRRFMYNFEMVYPILFLIVPGTDKEREEILYKVREVRFIPFCTVLFPNGLPIAESKIEEYLLSYNETMIEGDQILI

SEQ ID NO: 44763 - protein, 85 aa, unidentified
  REGION 1..85: note = Description of Unknown:random_neg_ctrl neg_ctrl sequence
RPSELISQFVALRWLTECPELGVCLSRELGINDLKKNGESILCREEWYTPEFERDDNVTDSAEYAYNRAHIHFTLKFNREKARII

SEQ ID NO: 44764 - protein, 85 aa, unidentified
  REGION 1..85: note = Description of Unknown:random_neg_ctrl neg_ctrl sequence
LVCYSIDIELSIGFLFFTLVSLLPEREIGQYVFNAKKVKFSMSIKRRTIKCGKGNNLLIKAREEEILTSAELALLIGFERLVYTD

SEQ ID NO: 44765 - protein, 85 aa, unidentified
  REGION 1..85: note = Description of Unknown:random_neg_ctrl neg_ctrl sequence
EAVKALRKFKFSIYLSMYASGVTLKAQQKFVKFSDRKYANFVGGRQNGAKNTDNVSKLVTEILPGDDPPVTAVGLISLPTKFANN

SEQ ID NO: 44766 - protein, 85 aa, unidentified
  REGION 1..85: note = Description of Unknown:random_neg_ctrl neg_ctrl sequence
KLSRLKHNWTAEKPSLETAVVLQVLIVAQSLLTDAADLSDVQHLDLPSREPAKAEKCSINGKTVLLCELIAKKRLNLWLSLGQVL

SEQ ID NO: 44767 - protein, 85 aa, unidentified
  REGION 1..85: note = Description of Unknown:random_neg_ctrl neg_ctrl sequence
EDFNYAVVFISFLVKVRFHALNFRGKKYREKSANSVPISKSVYEPAYRDLGLVKIGDIYVHLTRTGVVGTNVVARRLFYLLVLMS

SEQ ID NO: 44768 - protein, 85 aa, unidentified
  REGION 1..85: note = Description of Unknown:random_neg_ctrl neg_ctrl sequence
YIALLRTGQDQSKEINPAKGQAIQSISTQTGSGFEIVAPVKLQLIYVEVRDEEGPLNIFIIPNDAKSWGKSALICTKKGISTGED

SEQ ID NO: 44769 - protein, 85 aa, unidentified
  REGION 1..85: note = Description of Unknown:random_neg_ctrl neg_ctrl sequence
MIKDLGIQPSNPSEVLKIILRVTTISEFSSNLVNAYGPGVLVSIVVHSMEGLKKLMIKIKGTDAIGDTCGIYPDRKLHIKVGKIP

SEQ ID NO: 44770 - protein, 85 aa, unidentified
  REGION 1..85: note = Description of Unknown:random_neg_ctrl neg_ctrl sequence
GEPSANEHVSAVIGPNGVVLGKKAKCISRPSREIPNSSGILEVECRGFVYTFWMYGTQRGYVVLMAGVIIMREPWIPNMNTTKTQ

SEQ ID NO: 44771 - protein, 85 aa, unidentified
  REGION 1..85: note = Description of Unknown:random_neg_ctrl neg_ctrl sequence
EKHFFSLCEGVPLVDEVIRNDESPGLIGLSPTFEERKNILALNGSLKQAIMDILKNRFFVTTSEIEIRLYSDKSYTTRMWWTSII

SEQ ID NO: 44772 - protein, 85 aa, unidentified
  REGION 1..85: note = Description of Unknown:random_neg_ctrl neg_ctrl sequence
WDYAVIYFDGISYDLIRLQLEYESQGDLKLFALSNNFIQDAEPDNPYFEILTCASGFEGGVYANVASGEGTTTLGTLQVDGNEIT

SEQ ID NO: 44773 - protein, 85 aa, unidentified
  REGION 1..85: note = Description of Unknown:random_neg_ctrl neg_ctrl sequence
VPAVNNIVYKQLINDHEIARHSEAMNKVCMVMHVVTNKIKSINSLMEVGFVYRSRRTKEILVKSTTEHVTKVISGRSVRVVHLVL

SEQ ID NO: 44774 - protein, 85 aa, unidentified
  REGION 1..85: note = Description of Unknown:random_neg_ctrl neg_ctrl sequence
ALFLENKRGNFMGLLMAAKAIPEGWDYDSDERLLSPTLTLFGILHAFKIFTLNALLAYIIETLVIYGSHELPHKMSKEAIGTSSN

SEQ ID NO: 44775 - protein, 85 aa, unidentified
  REGION 1..85: note = Description of Unknown:random_neg_ctrl neg_ctrl sequence
LSDIIHFISMTTFAVTAKNIIKLSLWNFLAIQLDPPAELRTPPSAWPMTGNGSATYIRKSLSRASYGSGSYSAELATFNGAACVY

SEQ ID NO: 44776 - protein, 85 aa, unidentified
  REGION 1..85: note = Description of Unknown:random_neg_ctrl neg_ctrl sequence
AQLVIQVADSTNSTQRKKGYASVTISLKVARLESIRKREEGQQVMGVYAKVNKSHLRESRVSFADFYLPYSDLLTYKDPDALVGF

SEQ ID NO: 44777 - protein, 85 aa, unidentified
  REGION 1..85: note = Description of Unknown:random_neg_ctrl neg_ctrl sequence
MSFSGCRDSANAKIETIRVLTALPGIVPSQKNIDTEIKGTNCLKREGTFSSQRTPFHRTNPKQNVGLSQLNIKAKQGRARPGGPI

SEQ ID NO: 44778 - protein, 85 aa, unidentified
  REGION 1..85: note = Description of Unknown:random_neg_ctrl neg_ctrl sequence
RIMVGTTSEQRLKIKYAFAYYINTIKILHLMETGVTGFKYTEVLLHAGNSNDEIVPQDGGITEARVIIKLARSNDAILIPGTGDN

SEQ ID NO: 44779 - protein, 85 aa, unidentified
  REGION 1..85: note = Description of Unknown:random_neg_ctrl neg_ctrl sequence
SAIYNTKDPFPSIYDEEGQSLQETSELLLCLRATLYIMKVKARTYFWIGNASLAIGDAKNDSVQVVSKFIPTVLTKTEDTASFEE

SEQ ID NO: 44780 - protein, 85 aa, unidentified
  REGION 1..85: note = Description of Unknown:random_neg_ctrl neg_ctrl sequence
ILRYAIHGSVDGDAIEIENFETLAMSYALINWAHFETATTDMCAVILCEPMMTRRISFALITRTLNGSKSGAEDGTPCIWGESEV

SEQ ID NO: 44781 - protein, 84 aa, unidentified
  REGION 1..84: note = Description of Unknown:random_neg_ctrl neg_ctrl sequence
YQSLDTKSYILVARREKEKTSYKLSLTDESFTHALQQLAEKLKEGSMIKYCSSIFLYHRTTFEDKVASVELTQAKPNHVPVYVM

SEQ ID NO: 44782 - protein, 85 aa, unidentified
  REGION 1..85: note = Description of Unknown:random_neg_ctrl neg_ctrl sequence
VYIVEPAKVFAKNPLVVNAYAIVLHDVSRRTVLKAVAIFLITGRVKNNKIPLFLSGCYLLSRAIVETYCLKVVVNPDSKYYYTVA

SEQ ID NO: 44783 - protein, 85 aa, unidentified
  REGION 1..85: note = Description of Unknown:random_neg_ctrl neg_ctrl sequence
KKLVPHAILNYFRFGTIRQQLRETVQTNDTIVLDVAEYMKRYSFQREEKKISRRADFAMSIFPAYFPAEIKRFHFCRCTGRAVTQ

SEQ ID NO: 44784 - protein, 85 aa, unidentified
  REGION 1..85: note = Description of Unknown:random_neg_ctrl neg_ctrl sequence
VRSQPHYMKVPRPVKFSLDPGAVERQERVNGALQLSKGVGELPLMQTNGDVDEFDTHGTSDTQMLEIRLVVLSFAIKNQKPNEGP

SEQ ID NO: 44785 - protein, 85 aa, unidentified
  REGION 1..85: note = Description of Unknown:random_neg_ctrl neg_ctrl sequence
LARGVHRSKIRGLVEREKARTKLTCMYREYCTIKKVEVGGTTQVGAEGQSTQIDSHSFVRSGSKADAVNVSMRLNIIIDLYEVNI

SEQ ID NO: 44786 - protein, 85 aa, unidentified
  REGION 1..85: note = Description of Unknown:random_neg_ctrl neg_ctrl sequence
GFFNNIHHNEESSAAIKETIQMETVLCYNTNTYTLIYGRTIFLIAKVASIGNINLLLNRLGEACIFEIEEDNLEFEYDLQIKAFF

SEQ ID NO: 44787 - protein, 85 aa, unidentified
  REGION 1..85: note = Description of Unknown:random_neg_ctrl neg_ctrl sequence
EEGNAIKARQARHEFKAHKPVNRQLGFSMTITKLCCQPDSTQYKAHDGFSPLNNYVNETGCYSEVFEDISGVCEELDACSMTDEM

SEQ ID NO: 44788 - protein, 85 aa, unidentified
  REGION 1..85: note = Description of Unknown:random_neg_ctrl neg_ctrl sequence
ATNIKITDDLSNYVLCKKVSYHHTFIGANIMNSELVWLLSRCGQAAKPSIILRSKQLMKGVNEEIALQTERMISCVIIERIELAV

SEQ ID NO: 44789 - protein, 85 aa, unidentified
  REGION 1..85: note = Description of Unknown:random_neg_ctrl neg_ctrl sequence
FENAKNEYPKHKSWHTDTNVCKRLQKKDGYGTFRESEITENAVAPRLAAFAFECNLDGPNNTVDYALILKEIVGSKRSGYVAYTA

SEQ ID NO: 44790 - protein, 85 aa, unidentified
  REGION 1..85: note = Description of Unknown:random_neg_ctrl neg_ctrl sequence
AFVPKLRDVVSSVQIPPQWGKSEFSTEKIATLHGSRVLPTADIHVGSYTEAKEKLGPAIANLSNRYDPFRSVLLFKGSKDVGLVG

SEQ ID NO: 44791 - protein, 84 aa, unidentified
  REGION 1..84: note = Description of Unknown:random_neg_ctrl neg_ctrl sequence
DYVVALNFIGVIRAISSEPELMEALLLFYEILEVEEYLPLSVLVKRVGTYDAGDPNIVINNDNIAYAPLRILRYFGAPPVENII

SEQ ID NO: 44792 - protein, 85 aa, unidentified
  REGION 1..85: note = Description of Unknown:random_neg_ctrl neg_ctrl sequence
VVRFILFKLGNEKAHTVLPLLNILGNGTTRVADEIETDVKEATIKYKTQNQALVEMDKSTMRRYGPEGTPSFAETRTITSDVHFE

SEQ ID NO: 44793 - protein, 85 aa, unidentified
  REGION 1..85: note = Description of Unknown:random_neg_ctrl neg_ctrl sequence
VPWIEFSRGEVEIYVCLSNEYLKMLYAEEPYFVTMYILVPAPCDDPTEQTVSYCLDWLRSGIIEDGLQEINTYPLLQDVSYSADY

SEQ ID NO: 44794 - protein, 85 aa, unidentified
  REGION 1..85: note = Description of Unknown:random_neg_ctrl neg_ctrl sequence
FLISMGYGGILVDLCAKGSLDDKNKDYFKWPIVIAPWEKLLDMLGFHSGCYTGWFMTLLNVVYPMMCRFRTTSVSLKHPNPAQHN

SEQ ID NO: 44795 - protein, 85 aa, unidentified
  REGION 1..85: note = Description of Unknown:random_neg_ctrl neg_ctrl sequence
VWPYNPLDDDKGCFYAHLEVPIDNDQEIKLTKSYAESWEKFFSLTVNSIMLESPHLLSAPVNNNDEFYGANGFVELIPNTKILGE

SEQ ID NO: 44796 - protein, 85 aa, unidentified
  REGION 1..85: note = Description of Unknown:random_neg_ctrl neg_ctrl sequence
RLLEVGLSPYELIEDYEIGIIGLIVTIGEIILNLIGKCSTRKIPYNYMSGGPIIVSIYIPAYKATVPFWSDNDDAVGFPRKSTAS

SEQ ID NO: 44797 - protein, 85 aa, unidentified
  REGION 1..85: note = Description of Unknown:random_neg_ctrl neg_ctrl sequence
IIVPSSLCDGGKNDFFLRDMSIYYNMSVFTKLLGYYQCATFDNRTRSLAFDADEREGTDQNAPMICGAYIARDGAFLKGGIKLIR

SEQ ID NO: 44798 - protein, 85 aa, unidentified
  REGION 1..85: note = Description of Unknown:random_neg_ctrl neg_ctrl sequence
NVNMRLEFHVGLETNKSHIYKHENKMDMKVGLYLLTPQKNDFQLLFKEQYYIAEQNPKDMIIWEVNSHMDETIDAPDLVANIINV

SEQ ID NO: 44799 - protein, 85 aa, unidentified
  REGION 1..85: note = Description of Unknown:random_neg_ctrl neg_ctrl sequence
PVRHLEIMSGKYMDFYNNKVLSFCTDGAVNLLFGLTDIMMARIIRKASCAHWGKLHLSIADIWYELDLDKYAGGEPIAHEQILLK

SEQ ID NO: 44800 - protein, 85 aa, unidentified
  REGION 1..85: note = Description of Unknown:random_neg_ctrl neg_ctrl sequence
DIAIRFPPDYVSHDIKEKKENFGSSIKENLGTSLSEPLSIEISKSHIGIKETSLSSKPPDKIIQGRNYPSGTSGRQGLINRIELK

SEQ ID NO: 44801 - protein, 85 aa, unidentified
  REGION 1..85: note = Description of Unknown:random_neg_ctrl neg_ctrl sequence
IIIHSNKFVQYAGYVIAFLFLIIFRNTICSVREDIDIKTFGKRWMFYRARYSKMEVVALIETALTVIGLSLNRRVKPHVSDKRNT

SEQ ID NO: 44802 - protein, 85 aa, unidentified
  REGION 1..85: note = Description of Unknown:random_neg_ctrl neg_ctrl sequence
NFKLYEPDPMVISRAIAHNEFAIRMISSFSEGKGIPGKRNEFPHPSNNLTFNGDIPSYRSVIIFILTPTVILFTLRKIPISDKEY

SEQ ID NO: 44803 - protein, 85 aa, unidentified
  REGION 1..85: note = Description of Unknown:random_neg_ctrl neg_ctrl sequence
EKLLKDESKKFMTKEDLLNDSLFESQWDDASIQFPQKVILNPKPAAPSVLRVIFSPIVYKDLNINAISYQKRNIATLFPQTFWLI

SEQ ID NO: 44804 - protein, 85 aa, unidentified
  REGION 1..85: note = Description of Unknown:random_neg_ctrl neg_ctrl sequence
FYKSAAGPPELIIYGANICNFLVHCKNAQAKNKLPEIVLKQKYPMFVRIQSTPKMGFGRCSIYYVTTNSTVSGSWQARIKKINDI

SEQ ID NO: 44805 - protein, 85 aa, unidentified
  REGION 1..85: note = Description of Unknown:random_neg_ctrl neg_ctrl sequence
REDYVHKKLNLSARRQIISIIAVRSQAVMIFLKITQFADLQNTDIKSTGLAANGLLSESIVIHEVSLRKRAEIICKHIGSAKKDQ

SEQ ID NO: 44806 - protein, 85 aa, unidentified
  REGION 1..85: note = Description of Unknown:random_neg_ctrl neg_ctrl sequence
IYKQIVVFIFQYEVDVISKKTKLQNYSTICFKCVSNVVLGADCSKKLVFITKGTNTSGKLYAAHKIKQSYFLSTADGYSYLCDYR

SEQ ID NO: 44807 - protein, 85 aa, unidentified
  REGION 1..85: note = Description of Unknown:random_neg_ctrl neg_ctrl sequence
RTNVKLNAQPPLLPREPVNLFPFNVGYTGNQPLLIAIEPGFAGVMGLVGTLIPNKTLMFKVFFVPFTTCMIGKVLATGMADLIAI

SEQ ID NO: 44808 - protein, 85 aa, unidentified
  REGION 1..85: note = Description of Unknown:random_neg_ctrl neg_ctrl sequence
QSSISSYAYKIIPLQKLKMLANGTANNLMYENQELLGCEMTLYLYYLMTKQSFASGKYPITGRTGPKIGLWYAGIKSEFKYILKM

SEQ ID NO: 44809 - protein, 85 aa, unidentified
  REGION 1..85: note = Description of Unknown:random_neg_ctrl neg_ctrl sequence
SEFMYLGMIIFKVFINELGMYRTYSDFKPNITIEDDRLLLVCFRCLGGFNFYDNPNDRRFKFQDLESTASIKYKNMSKDRPGKIG

SEQ ID NO: 44810 - protein, 85 aa, unidentified
  REGION 1..85: note = Description of Unknown:random_neg_ctrl neg_ctrl sequence
MKCLVINNVGRDTKPVFLHLEIEAFAVLDWIKEEALGEGWQKYIIIANEIFGKSYVLLNISSHSKKEKKDEIFVPTEHSQNLTVR

SEQ ID NO: 44811 - protein, 85 aa, unidentified
  REGION 1..85: note = Description of Unknown:random_neg_ctrl neg_ctrl sequence
AGPSKFLSRLESLKSFVYFYKDSKFSDPVSFMYHKLYLEYDVDAVYQLSEVLIAIANTILIRYLLKCHWISNLLRGIEVEIGRAQ

SEQ ID NO: 44812 - protein, 84 aa, unidentified
  REGION 1..84: note = Description of Unknown:random_neg_ctrl neg_ctrl sequence
FKGEAKSKTAMYLFIVIQAALRSVDAAAKSRGKCTDLDKEYLLAIFELLCENHGSAQAFLSALPAHHHFIYSKDNKRQKDSYCA

SEQ ID NO: 44813 - protein, 85 aa, unidentified
  REGION 1..85: note = Description of Unknown:random_neg_ctrl neg_ctrl sequence
DKPIFSMGFRETMDILKPSSAASKIEEDGWYLYIVDLASGTEPVLEAINWIVIISAKLTLFIGDASSGTEADSDKYQEQRVVEVT

SEQ ID NO: 44814 - protein, 84 aa, unidentified
  REGION 1..84: note = Description of Unknown:random_neg_ctrl neg_ctrl sequence
ILEYAILDMPKAGNKTPADLDLRKEDGVVKARTLVYMILAVIDASCSRLLLGVQNEFLALDYVGNDYCIYLDDCKVPKLNSDNY

SEQ ID NO: 44815 - protein, 85 aa, unidentified
  REGION 1..85: note = Description of Unknown:random_neg_ctrl neg_ctrl sequence
VTSTSHPCPTMKREPKDLCAIITPNRMVVACLFPSTTHRINQHKQDSFGKKGQKIVKKLYEVFKSNVIRISPRSGSDGGLGLQQL

SEQ ID NO: 44816 - protein, 85 aa, unidentified
  REGION 1..85: note = Description of Unknown:random_neg_ctrl neg_ctrl sequence
SAEIRTEWMFIIGGLAAWDREEVMSSVKVSYFGKVPVLTINSALIYSIIGPGGFKKFAEPNGGAWFEKSITKEPRDSLLTEEDVV

SEQ ID NO: 44817 - protein, 85 aa, unidentified
  REGION 1..85: note = Description of Unknown:random_neg_ctrl neg_ctrl sequence
SNDAKYASSKPCINDILGLKASVGPTLVTTGEMNYLLPDIYIDKSGCAYIAASNVDCIDMTLSALSILNEDGYIGDIPNKFQAAS

SEQ ID NO: 44818 - protein, 85 aa, unidentified
  REGION 1..85: note = Description of Unknown:random_neg_ctrl neg_ctrl sequence
QAAYILQTLGKYVTLALNIQTNFSAGQGKGKEKEGAVLANPKSNMVFLLASTQKTFYIQSKAADYGKSIVGFAGFIALKMSSIVG

SEQ ID NO: 44819 - protein, 85 aa, unidentified
  REGION 1..85: note = Description of Unknown:random_neg_ctrl neg_ctrl sequence
HAFPVFEKTFLVYNGLLAEYWHTTFTYSEALILKDVKFLIKDYLLTFFIIQTCSMDIGDLRDYDAAEELISNWIHLESSYASSMS

SEQ ID NO: 44820 - protein, 85 aa, unidentified
  REGION 1..85: note = Description of Unknown:random_neg_ctrl neg_ctrl sequence
LMSDDVRINGIIMGYYQCITTPPKGDYKVTRHIKQFSEEGLPTRLCYAKISAQNAKNCQFSLSLLLSGGTFGARVMGKGEAIASL

SEQ ID NO: 44821 - protein, 85 aa, unidentified
  REGION 1..85: note = Description of Unknown:random_neg_ctrl neg_ctrl sequence
GGKFLYLASLKMESAIPVWYRWLFVVSSTDTDGSKFAKHPKDLIADTNGRKAMFPCVSKNVTYGKFQVPTNIYPIQNSTIIHTLR

SEQ ID NO: 44822 - protein, 85 aa, unidentified
  REGION 1..85: note = Description of Unknown:random_neg_ctrl neg_ctrl sequence
IKLSFVQVNDKGQGSTTIIIREFTGEHGKNLLIWATETHPSDEMKLSPKLRFELLDSPLRLTNPVYRTRSLLIENRSVGPIITGV

SEQ ID NO: 44823 - protein, 85 aa, unidentified
  REGION 1..85: note = Description of Unknown:random_neg_ctrl neg_ctrl sequence
ILIKYPKFVELVGNGSGSMLVEFDVFYPECGSMKWAFIIVTQAVVIFQIKVDPAPCEEFVYFKKNGDWPFYFEYWNLASEMNKIK

SEQ ID NO: 44824 - protein, 85 aa, unidentified
  REGION 1..85: note = Description of Unknown:random_neg_ctrl neg_ctrl sequence
NNSVLILDYVNLLYHLYANAAIKTVYKIIELGTLMASILANYEPAATLTPQEGNSIGQLGIAAVFSIFNYPILNEEFNAARMDRA

SEQ ID NO: 44825 - protein, 85 aa, unidentified
  REGION 1..85: note = Description of Unknown:random_neg_ctrl neg_ctrl sequence
KNQDLCNKVRKKMLAAHEQNVHNHRQLDFLAVRMIFDEIPDKNDIFATYTKCHKYRWFRIEELPDSSDRKKFMYTRLPSILIIKR

SEQ ID NO: 44826 - protein, 85 aa, unidentified
  REGION 1..85: note = Description of Unknown:random_neg_ctrl neg_ctrl sequence
KYAYYANSEVTGSRTGLFIIMLVIIFNLREVGFTLYGAQGKSLIETHAYDKSDAEDSIIEYVFQVEEVDPGGISVLEIKLSQGKF

SEQ ID NO: 44827 - protein, 85 aa, unidentified
  REGION 1..85: note = Description of Unknown:random_neg_ctrl neg_ctrl sequence
VRMQGGEQKKLHFRMEREEITEVICKQGIDVSDHEVYRGTEVYAVRAKISKQPLEVGNDAFIGAVGQPIEIDTNMLFYDARMVHT

SEQ ID NO: 44828 - protein, 85 aa, unidentified
  REGION 1..85: note = Description of Unknown:random_neg_ctrl neg_ctrl sequence
RWFKRSCGQDNFFVIGFIRSHGVMQGHGSELEYNKLRKLVGNLYIKITAAVATSAVKSYPEELEASPCFDIVACIHELKTADVNK

SEQ ID NO: 44829 - protein, 85 aa, unidentified
  REGION 1..85: note = Description of Unknown:random_neg_ctrl neg_ctrl sequence
HSKKQNLWVKITCLILERDLKNIAVKYGVLSLSTEMKVGHKSHIMADFPTQEGIEKHQSYFAAMRLDKVGVNTNDDATISRLDTA

SEQ ID NO: 44830 - protein, 85 aa, unidentified
  REGION 1..85: note = Description of Unknown:random_neg_ctrl neg_ctrl sequence
GTFLVGNIKIEKYSSCLQNRPAYGQPIIDAEEYAFLDAVMENNEITQIKESKLVISKAVCQYDGTLIDRDDTYTVDVLSRVMNNG

SEQ ID NO: 44831 - protein, 85 aa, unidentified
  REGION 1..85: note = Description of Unknown:random_neg_ctrl neg_ctrl sequence
SGYARLCTNGIENKIWLYYEISLAKRDNSVYTEMLPELTLLKYLELDILDGKCPTFGVIPIMITAAASKNLVSPSTTIFGRHSVA

SEQ ID NO: 44832 - protein, 85 aa, unidentified
  REGION 1..85: note = Description of Unknown:random_neg_ctrl neg_ctrl sequence
DISTLGPGLWDISKEQDGYFVYVDIEINVLGSYGNANVDGEYRGSVYIYLGLHRNKFEIKNVINFFKTRAYAKINAPVRTPKIGP

SEQ ID NO: 44833 - protein, 84 aa, unidentified
  REGION 1..84: note = Description of Unknown:random_neg_ctrl neg_ctrl sequence
YMYIFVELIGNADSEEDAIYIILLNIHSHVYIEYTEIKVNDFVGLELSLRSLYGATYIPCNITLSSVVDARKGSMINTQLATAG

SEQ ID NO: 44834 - protein, 85 aa, unidentified
  REGION 1..85: note = Description of Unknown:random_neg_ctrl neg_ctrl sequence
VVGLEFLKARLFGVNYSARINEFMTLADNLMSLGRLSLFEVKVKEGETKNLSYIEQLHPVDGNGITLVIGSHLTWFDDAKGPVNF

SEQ ID NO: 44835 - protein, 85 aa, unidentified
  REGION 1..85: note = Description of Unknown:random_neg_ctrl neg_ctrl sequence
FALMPAQGKLVLAIYIVAPIWIELGIGNFELTSFIRIFAIKELIVNQGNGLFDNKLTAGPITSIRINCVEGRGMDTVTTQIGGSE

SEQ ID NO: 44836 - protein, 85 aa, unidentified
  REGION 1..85: note = Description of Unknown:random_neg_ctrl neg_ctrl sequence
NRCSATDAPTTAATANIYSLLRMLGQMWDTEAFNCSPKELIGLESVRKVASKPATSITRIVDSNYSKPQIEERYQNSCAPIHSVY

SEQ ID NO: 44837 - protein, 85 aa, unidentified
  REGION 1..85: note = Description of Unknown:random_neg_ctrl neg_ctrl sequence
FTDPIILSSGIVPMTVSVEYDVISAAFFLNSTGAPILWLSDFVDRLLISINSLFSNFSKELLGEELKTSVNSDIKKLKENAEGSY

SEQ ID NO: 44838 - protein, 85 aa, unidentified
  REGION 1..85: note = Description of Unknown:random_neg_ctrl neg_ctrl sequence
KSIEFYFISADHENKYGGGALPNAGLQVELDEKKESSQSDFQQVPCDHIEDGDVSVVSHVRSRKNVDLRHNHLEPGTAETMDHLT

SEQ ID NO: 44839 - protein, 85 aa, unidentified
  REGION 1..85: note = Description of Unknown:random_neg_ctrl neg_ctrl sequence
GLSRYFQAGGYTNIKLFEIGTVVGPGALDCYFMFVYDSEKISILEQRRNKTLINHLEAILSAYYVNLNFRLLFMKGKLQKQDYAW

SEQ ID NO: 44840 - protein, 84 aa, unidentified
  REGION 1..84: note = Description of Unknown:random_neg_ctrl neg_ctrl sequence
KSNGGVSASGCAQGGLFVWEDLIKLSILIKEQKSYIELSKDKDVGAPYVKLQGGKDLEEYLTAAKGCQAEIASGFIHKDVLLPE

SEQ ID NO: 44841 - protein, 85 aa, unidentified
  REGION 1..85: note = Description of Unknown:random_neg_ctrl neg_ctrl sequence
TKYEESAIKKTDPEELMVQNRDNDMSNSMVFPTGVILSAVGKDNLSSAFKSQRLIKTHSKIGKFYDTAHGFYKILAMIASTSFKH

SEQ ID NO: 44842 - protein, 85 aa, unidentified
  REGION 1..85: note = Description of Unknown:random_neg_ctrl neg_ctrl sequence
EHLGSEPVLTIRRLFGFPSPDWMTINYGHPVNIVRLEHEYDNSEFGLISNCMLTCIGGEVISGRQGDGAMYDSDSSITMVDYEFI

SEQ ID NO: 44843 - protein, 85 aa, unidentified
  REGION 1..85: note = Description of Unknown:random_neg_ctrl neg_ctrl sequence
PENIVATFGLIMKTGKRTQFLVLKASVYGGQCPNATGSYKASRDELAPTGHNLLQIWHSRTETRFSNALRISTAIARGAQVTSPS

SEQ ID NO: 44844 - protein, 85 aa, unidentified
  REGION 1..85: note = Description of Unknown:random_neg_ctrl neg_ctrl sequence
GPRGIEDEINLELGIVVYYLSLPFEINRRSTGECALRFKQPQLSARAVPHLLDIVAIHGQSFYGDVRLSPSGVLLSTTSIGSDGP

SEQ ID NO: 44845 - protein, 85 aa, unidentified
  REGION 1..85: note = Description of Unknown:random_neg_ctrl neg_ctrl sequence
LLPRSGDYDTSSELVKKVWYISSEVVMITNTVDKGTDRLPDSNESTMPYGIMNKDRNLYLLENETDKYIMSNKEPRSSLFSSIDC

SEQ ID NO: 44846 - protein, 85 aa, unidentified
  REGION 1..85: note = Description of Unknown:random_neg_ctrl neg_ctrl sequence
KGGHFPVRKLQDPRLILGVSKSSFNKCPLAMIKTWGTWPSDFEQDTESNLLKKCLLAQVVLSIFALVNWLAEGLAFVQVSDVNSQ

SEQ ID NO: 44847 - protein, 85 aa, unidentified
  REGION 1..85: note = Description of Unknown:random_neg_ctrl neg_ctrl sequence
IDVTPILGTKLDNKSSIGLEEHLKPIEILEVEDNCIVKIIKTISGLKYNLLYLGSYLSEFCLPEELEYKRYYSYEAKLNGLLLDN

SEQ ID NO: 44848 - protein, 84 aa, unidentified
  REGION 1..84: note = Description of Unknown:random_neg_ctrl neg_ctrl sequence
GVLLEEKWQIELLLYLSQEYIYAPLLLTNISCAIVMLGIRADYINPEESVYAKNFGYDKTMTYKHVEGNPLIGEIHVQSLLNTF

SEQ ID NO: 44849 - protein, 85 aa, unidentified
  REGION 1..85: note = Description of Unknown:random_neg_ctrl neg_ctrl sequence
RNGNSLGVFFIDNRCWDKTNRGDDKVNEILNMYWSAAKTLSITSVRVIMIGKKNPNIEFDCSEGYVKISSPDERIEALKKFREQG

SEQ ID NO: 44850 - protein, 85 aa, unidentified
  REGION 1..85: note = Description of Unknown:random_neg_ctrl neg_ctrl sequence
NRYVHTVEPHLQAGNSTSAIYMFIAEKVGGPGIIKSSNAHLTSNYGRLQTLTFVTHPNGMMAKDDAEAYANIAVFKILNELTVEG

SEQ ID NO: 44851 - protein, 85 aa, unidentified
  REGION 1..85: note = Description of Unknown:random_neg_ctrl neg_ctrl sequence
KNIVVSGYKLEALIIPVLSDVKLEVVNAGRKPAIEKCSIRRIQPLLPVFMAFDLWCIDRPTEVSSFVYDIIVLEGLGMIKELKGF

SEQ ID NO: 44852 - protein, 85 aa, unidentified
  REGION 1..85: note = Description of Unknown:random_neg_ctrl neg_ctrl sequence
LIMLEVRLRSVSFGCIIICRELYYPYFSIIAALETNISEFLVISEHWLSVMRAFFIYVQTLDEPYVNMERGKGPANSIDMVAVYG

SEQ ID NO: 44853 - protein, 85 aa, unidentified
  REGION 1..85: note = Description of Unknown:random_neg_ctrl neg_ctrl sequence
LPHSVYLSRQELLINAAETMFFKTLIGKNDGYAFVEDDALASFRPKIIDNIADALIDVITGLFSSQGLGKMKIHNVLGRNGLAQT

SEQ ID NO: 44854 - protein, 85 aa, unidentified
  REGION 1..85: note = Description of Unknown:random_neg_ctrl neg_ctrl sequence
MTFHVDFAYVQNIEEDHFDIGYGPPKPAGMALNYLMGWEPNPRESEVKEAETLALDGLAMLKSFISYRGYWDYANMGDALLKAES

SEQ ID NO: 44855 - protein, 85 aa, unidentified
  REGION 1..85: note = Description of Unknown:random_neg_ctrl neg_ctrl sequence
TATRDAPMHICKPLEKKISGQKLFSVAALMNHIKPVFMKVSTQGKFSKSAVKTSVERKGIAGVDGRHKIRKNAGVWEPPGAPIFK

SEQ ID NO: 44856 - protein, 85 aa, unidentified
  REGION 1..85: note = Description of Unknown:random_neg_ctrl neg_ctrl sequence
DDDVQLTRPEILSTRAEKVYGGALLKIGTMTIRSGLVNGKENPEVESWDDDMKSPIFELKSPPYIYLASKSVLRPIELLLLLVKE

SEQ ID NO: 44857 - protein, 85 aa, unidentified
  REGION 1..85: note = Description of Unknown:random_neg_ctrl neg_ctrl sequence
ILAPGYIRYNKIGLFVSMVSCNDHPTTEAIDKRENDESLDSDGSLMEPHIEPIGLYVYPLESTKSEECKSFFAAESNGGAELKGV

SEQ ID NO: 44858 - protein, 85 aa, unidentified
  REGION 1..85: note = Description of Unknown:random_neg_ctrl neg_ctrl sequence
DAIELTRLSLKLSARSSLLDKGGTLVAGDGYLGKERDRNKEKLDVTVPSHDPLFNVNLTFASTAKLLKIIGTLKIKVGNHRNMAT

SEQ ID NO: 44859 - protein, 85 aa, unidentified
  REGION 1..85: note = Description of Unknown:random_neg_ctrl neg_ctrl sequence
LDKLSNMFGDKANKNGELDFMCSRINEYTTYGDLVHIGGVGKIAVMQLSKNYAMVCPLLLLKKSIDLIMVIHILVNMMVSKGYGY

SEQ ID NO: 44860 - protein, 85 aa, unidentified
  REGION 1..85: note = Description of Unknown:random_neg_ctrl neg_ctrl sequence
ILLECLGFTGQVQRHIIFNKELLVWRGYKSVRDSALPESRCPNLTAKRNSRPIASRGKGECFFLLKLKQQFGSQNHTIRSLPLLT

SEQ ID NO: 44861 - protein, 85 aa, unidentified
  REGION 1..85: note = Description of Unknown:random_neg_ctrl neg_ctrl sequence
GLSIERAIATVLLGNNVSINDVIDEDICQYLSNCSIYLLELNKIQNCIWSSLPARSKKLNVMVSERPILLDLFDKSNLLNFLETM

SEQ ID NO: 44862 - protein, 85 aa, unidentified
  REGION 1..85: note = Description of Unknown:random_neg_ctrl neg_ctrl sequence
KTVGTFAGKDVVSRKINGFHSKVDLTIQKTDASINDPDRKSINDITDHDILGEKSKNVYKLKSSDFEPGKLRMYSVDDDKTVRSN

SEQ ID NO: 44863 - protein, 85 aa, unidentified
  REGION 1..85: note = Description of Unknown:random_neg_ctrl neg_ctrl sequence
FIQFLNVQENSIEIIGISHETCAPNFTNIVGHSQPINIWSVNLVPVIQGLTNAELLALSLPVYECYQYSSKIALSEVWINSLNMV

SEQ ID NO: 44864 - protein, 85 aa, unidentified
  REGION 1..85: note = Description of Unknown:random_neg_ctrl neg_ctrl sequence
YKLERAITLDITEVTYDSIIISTLKFLPLTNDPSEAVPTYANSALAKSITGKKSPLDSTSAWYADDKFYLLVLTKIFCANEPDCL

SEQ ID NO: 44865 - protein, 85 aa, unidentified
  REGION 1..85: note = Description of Unknown:random_neg_ctrl neg_ctrl sequence
RFGGVRIPDAAIQMDYYGSILELVFNTQIPAEGIRAMEEDRKGIKKQQRYIPLKDKLCFCLGITKLEHHNTAHPYNPGLKYMIPL

SEQ ID NO: 44866 - protein, 85 aa, unidentified
  REGION 1..85: note = Description of Unknown:random_neg_ctrl neg_ctrl sequence
SEKRPITYDGSGPLVNTEICGRGPSGIPRDLFEQIAGYSLSGSSPVKESVVDNTILPNIDEIPFRASEFNDNAIPSYVNDQEKIK

SEQ ID NO: 44867 - protein, 85 aa, unidentified
  REGION 1..85: note = Description of Unknown:random_neg_ctrl neg_ctrl sequence
IDAPYSTYLKLSYLLMHYYIPHFDEIGIAMSVPGGQGKDILQQQCSGWPQSTLIIQSHEKFLDIHVEHARTCHPYDSDLKVLLWQ

SEQ ID NO: 44868 - protein, 84 aa, unidentified
  REGION 1..84: note = Description of Unknown:random_neg_ctrl neg_ctrl sequence
HYDMELDNNNVYSEVAKYERLVTDKDIKCLQREIFPPYKDSRTNDPPPPGAYTDRAVLKFYPCVNLLSSRDLSLLTERTIIIER

SEQ ID NO: 44869 - protein, 85 aa, unidentified
  REGION 1..85: note = Description of Unknown:random_neg_ctrl neg_ctrl sequence
IQAHLRIEITYNYSKGAGARQDTNMEVPQLNNRTLFISNPNPKRWTNMVGKELSQEVTMGRGKHEAVYNNSLIDEKVNVSNCERI

SEQ ID NO: 44870 - protein, 85 aa, unidentified
  REGION 1..85: note = Description of Unknown:random_neg_ctrl neg_ctrl sequence
RERSNEFTTCIYGKPAERLLYSFVSVEAAALTVSKMAVYSGYETDLRKGQDRVDAESGLYGFVEVHFINKSGQCRQALPIVVLVG

SEQ ID NO: 44871 - protein, 85 aa, unidentified
  REGION 1..85: note = Description of Unknown:random_neg_ctrl neg_ctrl sequence
VKGLKFDLDFQLIFEVRVLDGSKKVLELKWDATPLLNAVFGLRESMTRDYDNYEGHFIESLMFWYREIQFTQRMAFQGYIKVLIL

SEQ ID NO: 44872 - protein, 85 aa, unidentified
  REGION 1..85: note = Description of Unknown:random_neg_ctrl neg_ctrl sequence
LNFNPQIVGGTAIIPKREGKTYPVNTNFERESLLTLKPGCYINVASEMLESWRLVAAFSVKQPMTEGIKLSEDTAAIGKIRALKG

SEQ ID NO: 44873 - protein, 84 aa, unidentified
  REGION 1..84: note = Description of Unknown:random_neg_ctrl neg_ctrl sequence
QPISKKESKVIYFDLRTGIKLEALRIERSAKESDTVLAYQDTLKKESNYQLLRILLIIVPRDLTFDEVLFNREHDATSVGLFMS

SEQ ID NO: 44874 - protein, 85 aa, unidentified
  REGION 1..85: note = Description of Unknown:random_neg_ctrl neg_ctrl sequence
TARTVEVRVNGSNDNLRIIERHYTIEDRKHVSANPTTAGVEPLATSDILNTVIMNLYEKSGVNLKYGAYAFKQLGTRFIHWEAGG

SEQ ID NO: 44875 - protein, 85 aa, unidentified
  REGION 1..85: note = Description of Unknown:random_neg_ctrl neg_ctrl sequence
RNSGCDKAKSFPAVRSEIIFQSKYINKKLNMFSLSIESCVELYSSAPWQAPKKPNNSNNSKEDIASWEYSFESFPNAGHNTSVEK

SEQ ID NO: 44876 - protein, 85 aa, unidentified
  REGION 1..85: note = Description of Unknown:random_neg_ctrl neg_ctrl sequence
EIVVESYTDLSLGRFALPKPNHYSSSKAYLPIAALAKIFVPSPNKGNMKEHELFDLFQIKILIFWLKTELIDPRISNTSIYLQAY

SEQ ID NO: 44877 - protein, 85 aa, unidentified
  REGION 1..85: note = Description of Unknown:random_neg_ctrl neg_ctrl sequence
CRPPVTDNNEFKEMLESSFLIEIVRVQKFSRRLSGQPFASGVGKRKLLKDFLAVVRTVIQGKLEISLFSRGLSIYNSLKPETNIK

SEQ ID NO: 44878 - protein, 85 aa, unidentified
  REGION 1..85: note = Description of Unknown:random_neg_ctrl neg_ctrl sequence
LKELENARGDNISLGSVTDEWSVCKCTSIHGLGFIQTSIINPPSTMTMRTISIYFTGYQLMCKFINFGGIEMSALAEIEEIDKFV

SEQ ID NO: 44879 - protein, 84 aa, unidentified
  REGION 1..84: note = Description of Unknown:random_neg_ctrl neg_ctrl sequence
ITGGEPKFITWGLFFNHNAQCANLGPTFTLENEILAINEDEPDYEEAIALQTPDHVISPRAKFGKPKPLRLTVDVKQVGDLNGG

SEQ ID NO: 44880 - protein, 85 aa, unidentified
  REGION 1..85: note = Description of Unknown:random_neg_ctrl neg_ctrl sequence
QAATVMLREPTIETRFAGTAIELLFFSITGDKDDSRYKKTSVSLLPIGSVDSVELRFAGEEGNVGPVLQITTLLRKKLSTGFKAT

SEQ ID NO: 44881 - protein, 85 aa, unidentified
  REGION 1..85: note = Description of Unknown:random_neg_ctrl neg_ctrl sequence
VRRSRINEFEESSLFLVVVSLYFAMSNITSFNGPMEEPGDVNLNGSLLKIILPNSAKIIGAALHTAFVIDILGTISAFARFEDED

SEQ ID NO: 44882 - protein, 85 aa, unidentified
  REGION 1..85: note = Description of Unknown:random_neg_ctrl neg_ctrl sequence
GAAELQCLTPSEAQGAYNIEDYEDNKTRVSTIGITKLKCISEYFGFSKMFKGGLNLFPLDFHHFLSPKAAYYITYEVCIYRVCLS

SEQ ID NO: 44883 - protein, 85 aa, unidentified
  REGION 1..85: note = Description of Unknown:random_neg_ctrl neg_ctrl sequence
DARIISKVCEYSESGKALLFPTIVASRASGENMLASKCDTYEFSDFVAQFYKDYLNMTRTSHINPILVNYPRNFYGIGGVIVGLG

SEQ ID NO: 44884 - protein, 85 aa, unidentified
  REGION 1..85: note = Description of Unknown:random_neg_ctrl neg_ctrl sequence
YYSSAKDLAEISGLMQLGSNGSSTGWKILLNAPPLCGTGVKWFFKCLEFCIDMIIGSAIVVIPDVHISACNLFSKSIDSLIILEF

SEQ ID NO: 44885 - protein, 85 aa, unidentified
  REGION 1..85: note = Description of Unknown:random_neg_ctrl neg_ctrl sequence
LNGANARRQDEVTNSETRKETIDMTSLGIDYMLQKLECICSMGDFKTAFAKANQLGTDSGSSITVADNLGPAPLLLVRIDADKPP

SEQ ID NO: 44886 - protein, 85 aa, unidentified
  REGION 1..85: note = Description of Unknown:random_neg_ctrl neg_ctrl sequence
NMELRGTTKAPLLEKADLLDYCFSDLDAIEFVIGVSTNEGLTLKPSGRSNSSSFCRWEGGFLPLPQMESPFARGFDIIYDVRKKI

SEQ ID NO: 44887 - protein, 85 aa, unidentified
  REGION 1..85: note = Description of Unknown:random_neg_ctrl neg_ctrl sequence
RISINMMYDLRGLSGKSVVSLVQSVIIFRPCSASAFAVFSLIACYGGDYAVSTTTPPNLLAVDRNLVDKTGYQQAADIYKQESVI

SEQ ID NO: 44888 - protein, 85 aa, unidentified
  REGION 1..85: note = Description of Unknown:random_neg_ctrl neg_ctrl sequence
RVRFEIESTIVGAGSEGGAAEIASIILGPRVFVETKRTGVDRIQLTVVVSYNETKVRPEEGGQGLKPRYVAGVVENTIALVYAML

SEQ ID NO: 44889 - protein, 85 aa, unidentified
  REGION 1..85: note = Description of Unknown:random_neg_ctrl neg_ctrl sequence
ELNSGNNIYLGLISSLGPNKDFPHEAHTFRRGQDGDSVQCENLYKQIESAAFKFSFVEMYKSIGASIKQYFREDICQSDGIKADR

SEQ ID NO: 44890 - protein, 85 aa, unidentified
  REGION 1..85: note = Description of Unknown:random_neg_ctrl neg_ctrl sequence
VRMASNAFIGIGELEVLYKSRGLTLLGVLGILGFFITPKGSEDASEVDTQLISDLNKVTIVKIVMIQGFYMLGKEAVLDAITCKL

SEQ ID NO: 44891 - protein, 85 aa, unidentified
  REGION 1..85: note = Description of Unknown:random_neg_ctrl neg_ctrl sequence
ENVPMFIVTTGDRGVYPTETCAKILLKLVPVFVAFIPLGEVNNNHYPTKDLLTRFITGELEIYYPNYLLVINIIINGMYGSQRVQ

SEQ ID NO: 44892 - protein, 85 aa, unidentified
  REGION 1..85: note = Description of Unknown:random_neg_ctrl neg_ctrl sequence
NVGKPISPVARITFEFAESLIGDKESDSSPAKIWEIYDGLWDINEAISVVPDENTDAEVPLQCYPIRRKWVKFKTVASKSKVKAF

SEQ ID NO: 44893 - protein, 84 aa, unidentified
  REGION 1..84: note = Description of Unknown:random_neg_ctrl neg_ctrl sequence
DGIRGDIQTKFRAAEDTIKATLFLLLSMQVEIENDINDVHRRDSYSRGNGITPIVKTFAGKVKEYFFDTCFHLGLCYSIAEKVA

SEQ ID NO: 44894 - protein, 84 aa, unidentified
  REGION 1..84: note = Description of Unknown:random_neg_ctrl neg_ctrl sequence
TPLSETTHSIAILIATIALETSCAVGLYPNMKYSQRTKELLCIYHQLKIAKSELKIVNYRMVKKTGYGGLSIKTAVLSIAFMKG

SEQ ID NO: 44895 - protein, 84 aa, unidentified
  REGION 1..84: note = Description of Unknown:random_neg_ctrl neg_ctrl sequence
VKLKTGILATTPYNETLHILLQVGLSFEIDNLYGYPPASKWLKHVCAVGNASLGVDVLGKRCTRSNINGFKEKWLQISMDFNLP

SEQ ID NO: 44896 - protein, 85 aa, unidentified
  REGION 1..85: note = Description of Unknown:random_neg_ctrl neg_ctrl sequence
TLRFAVVINRSVTELLLATKAHGGHSPFNLARKFILKYKTAYFGNVLDGIDSSTDNKWYLGGVETSGYVYSRYLGPNIADFNWKR

SEQ ID NO: 44897 - protein, 85 aa, unidentified
  REGION 1..85: note = Description of Unknown:random_neg_ctrl neg_ctrl sequence
RVLGNPVIIIYVSVESLLALTIFTAKFSQSHNAVPPRNNLSASTSIKLIHSTKQSSELKGVDRKCVIHNKELRLAAIMDVYPKDT

SEQ ID NO: 44898 - protein, 85 aa, unidentified
  REGION 1..85: note = Description of Unknown:random_neg_ctrl neg_ctrl sequence
LDPPSLRGSYRAIVSDIPIIVGGANVHHINGLKRGVVNAMTCLMESKLALDPRYRIGQEISAVTDKYIYSKRGAAPGVNECDTDI

SEQ ID NO: 44899 - protein, 85 aa, unidentified
  REGION 1..85: note = Description of Unknown:random_neg_ctrl neg_ctrl sequence
QLLGQSIKHTIKNTEVDFLTLKESEVFPSHPLREYGANLPKIYTQPYNGINMFGINNKGREHFPGNNIAEKLSGRPMKHVIVLKM

SEQ ID NO: 44900 - protein, 85 aa, unidentified
  REGION 1..85: note = Description of Unknown:random_neg_ctrl neg_ctrl sequence
PNSFIGLISDKAFRRHNDAYLIYRLCDKFFKDVNRNAGDSLAGSSSKVEFYPSEASLIKYAGSIVKGYMPIILEEKLVGQAFIKL

SEQ ID NO: 44901 - protein, 85 aa, unidentified
  REGION 1..85: note = Description of Unknown:random_neg_ctrl neg_ctrl sequence
QVGTVYIKKHDSERGSYYVIVSIMKEIRGNAKDQLSSIISQPTPYDIMSVFTTIEGGLGSYLKACYGQFPEETIQFKFLKLCYVI

SEQ ID NO: 44902 - protein, 85 aa, unidentified
  REGION 1..85: note = Description of Unknown:random_neg_ctrl neg_ctrl sequence
PEIENEDAGDSGKLSDAARNFCFIPESPYYDILFIDPVNLKMADIDWPLFTDELTLYKFKTYYKWMEPNKVRFGDKAIKNEPINL

SEQ ID NO: 44903 - protein, 85 aa, unidentified
  REGION 1..85: note = Description of Unknown:random_neg_ctrl neg_ctrl sequence
EEIIPKDESARPDEEELCDFSYGSLPNVIAVIYILRGTFDRDLAMILTFNKVASYAPQLDIWMELGFGALCDSYQNCMVDIPPGQ

SEQ ID NO: 44904 - protein, 84 aa, unidentified
  REGION 1..84: note = Description of Unknown:random_neg_ctrl neg_ctrl sequence
LGLICVYYAMKRAYLDYDVETPIIEEGITNVKSTLLTAGGQRRGVANILLLALNGGNGTARRYSNGRMEKDKNGKKDIPGHCLS

SEQ ID NO: 44905 - protein, 85 aa, unidentified
  REGION 1..85: note = Description of Unknown:random_neg_ctrl neg_ctrl sequence
NPIFVLNILDDGRTISIFIRAYNARVRKRGQEQPQKIRNTPICNHVRMGSVRTLLAFIDNCYARWTSVTFNLSMICYSIKPNGPL

SEQ ID NO: 44906 - protein, 85 aa, unidentified
  REGION 1..85: note = Description of Unknown:random_neg_ctrl neg_ctrl sequence
LKISMFALLIKAYIKFCLNPCCSPLFMGGGYLVYEYEPPHFVQEDGETIYLPYVDEDPGVLLVIKKVSDLDRSTGVIFEVLNARI

SEQ ID NO: 44907 - protein, 85 aa, unidentified
  REGION 1..85: note = Description of Unknown:random_neg_ctrl neg_ctrl sequence
YANVDTDDEKFLESNNSKAFRPLTRLTIFIVGLRPIGTRNILDEAIGPFGLICAYLFHMRNITVPLKQQSICSFTIVTLGLILKI

SEQ ID NO: 44908 - protein, 85 aa, unidentified
  REGION 1..85: note = Description of Unknown:random_neg_ctrl neg_ctrl sequence
QQFPFRELNLADVTTPSPKSSQLYTPNVYFVLQVLVTNNIFLTKTNTEPLKAIIYDYFPVYTAQFALVGEVEVDIKVVKFESREE

SEQ ID NO: 44909 - protein, 85 aa, unidentified
  REGION 1..85: note = Description of Unknown:random_neg_ctrl neg_ctrl sequence
FSTERDLAGRAFTYKANINLFLHIVLAVNKPLLIVFAIGKSSSGGEYTRHNAANLPPIGITILISELFLCKAKLNILFEEIEASD

SEQ ID NO: 44910 - protein, 85 aa, unidentified
  REGION 1..85: note = Description of Unknown:random_neg_ctrl neg_ctrl sequence
YSIIINSPWGGTPPTVEVASPQRNSWVSEAILALFIANGNLTVALIKTYLSQGGSSAFENQGGEDFEYYRTQCPYKVKDSKGSVQ

SEQ ID NO: 44911 - protein, 85 aa, unidentified
  REGION 1..85: note = Description of Unknown:random_neg_ctrl neg_ctrl sequence
KANTLQIAVRGKSAEILLTPLYDCGLWKTYNNLGILELYLHTDYAGGTSFAGKAILTGTDKRTNEGLNKEVTYPEEAVLISDALK

SEQ ID NO: 44912 - protein, 85 aa, unidentified
  REGION 1..85: note = Description of Unknown:random_neg_ctrl neg_ctrl sequence
IKAEEAVKANNKNKERYIPNLPGKTTFSEEFILEIERARKNNLTNLHLTILLSTIYDLIQLTEGSGALIERTLLKKPSINRVMIF

SEQ ID NO: 44913 - protein, 84 aa, unidentified
  REGION 1..84: note = Description of Unknown:random_neg_ctrl neg_ctrl sequence
FLAGYSEGYAKLLKYYEPTEDFTPEPEQWPFGIKNVNGHPTKKIGLIANAPLALDILCCKSSIVNDYSKKICVVILYHYGKGGK

SEQ ID NO: 44914 - protein, 85 aa, unidentified
  REGION 1..85: note = Description of Unknown:random_neg_ctrl neg_ctrl sequence
EIPVRRALSKIDRKSKLTPLTANTSSISNDPRLVEAGCLKGCKRFIQIVASFIEISKINAKGSTQVSYPLDVLDDKELEVSTFKP

SEQ ID NO: 44915 - protein, 85 aa, unidentified
  REGION 1..85: note = Description of Unknown:random_neg_ctrl neg_ctrl sequence
HYKGHLSIHEDIEHVRAEVPTPQPLILDEGVTKLGEYVAKKVAEEEYPVSIFSVIATDNGPEATIYYPTINEKHGGPFNNIPYIN

SEQ ID NO: 44916 - protein, 85 aa, unidentified
  REGION 1..85: note = Description of Unknown:random_neg_ctrl neg_ctrl sequence
RDEAKNSACSHSPKALTAQSWTVAMIIRHKQFTTLSSVQAGIIPIEVKCLDYEGKEGDKVYIVFAATELGGPSILKHPDIENLGI

SEQ ID NO: 44917 - protein, 85 aa, unidentified
  REGION 1..85: note = Description of Unknown:random_neg_ctrl neg_ctrl sequence
PFEQRADKQELGSYEIGYELPVRALGDGSWRRNVSIGRYYEVYEMPIMGSADDNIKEGGRDIIEVGRYYITIWMKIYVIGSEHYV

SEQ ID NO: 44918 - protein, 85 aa, unidentified
  REGION 1..85: note = Description of Unknown:random_neg_ctrl neg_ctrl sequence
IKKIDTMRNSIIKQRLEMILGMVNKEPYEPDRAEPFEVFTSSSVASAEIDRKNHIPSKRDDVQNLGSEEFEFSDSKWPGFNGFGL

SEQ ID NO: 44919 - protein, 85 aa, unidentified
  REGION 1..85: note = Description of Unknown:random_neg_ctrl neg_ctrl sequence
LFKIIKPPILTQGTLHWEKIHTNQTMVITYLIIVQTESLFRAVDVASNTEVSLEPDAGPAAIANGVTVEGLVSSKTFAVIAKVRK

SEQ ID NO: 44920 - protein, 85 aa, unidentified
  REGION 1..85: note = Description of Unknown:random_neg_ctrl neg_ctrl sequence
ANTINRAISLDQPWKRYISFLPLALTLIRAPQESGRRKVTILSLNVVSITASNVNEQKKIFPLAKFKNSCYSFDQLRRCTENKTN

SEQ ID NO: 44921 - protein, 85 aa, unidentified
  REGION 1..85: note = Description of Unknown:random_neg_ctrl neg_ctrl sequence
DENIEQVLVVGAKIAITSSLEPERNGAEAASTVLGLPFYTGLFVKFSGSALDFHPLAVRGKQPIGEVSEQEVIHFRNSKERYFRR

SEQ ID NO: 44922 - protein, 85 aa, unidentified
  REGION 1..85: note = Description of Unknown:random_neg_ctrl neg_ctrl sequence
ADRHVVAKYQMIQNIDTGLRKVQTKIRDPSKKSIEAPDHSSEEIALRDQNATTNVVYLSIRAKDKFSCRWVLSNVHALTFARDER

SEQ ID NO: 44923 - protein, 85 aa, unidentified
  REGION 1..85: note = Description of Unknown:random_neg_ctrl neg_ctrl sequence
ESELTGNFWEESPLVDPSTEEDPLLNYIRASKVRYYSNSQFIRKLLGEQLGGTEAGKEIWECSVPHIVVTMPQKKTIVESNGNIF

SEQ ID NO: 44924 - protein, 85 aa, unidentified
  REGION 1..85: note = Description of Unknown:random_neg_ctrl neg_ctrl sequence
YRILVLTSLEHCGLEISLDDDVDKGAYGHPLPINKSYLDPQEPVYARPVGNKAGAEITSADRPVRYFGKPHLCVNKDVEDYDDTY

SEQ ID NO: 44925 - protein, 85 aa, unidentified
  REGION 1..85: note = Description of Unknown:random_neg_ctrl neg_ctrl sequence
EQHVYIQNVLLVDIANYVIETSYVCPLENKLNIKKKEQEESPENDLIDKQTLDEEVYVLDIVAPGVLIRKLYGTRNEAMMQGRGA

SEQ ID NO: 44926 - protein, 85 aa, unidentified
  REGION 1..85: note = Description of Unknown:random_neg_ctrl neg_ctrl sequence
TERLEKLLILPEPNVSGKRGFYAAYNKRLLAETAANFTLHSLEGSALGELQDMKNEEVTVYVEAKMGVYRVNGATANNQVKKEDA

SEQ ID NO: 44927 - protein, 85 aa, unidentified
  REGION 1..85: note = Description of Unknown:random_neg_ctrl neg_ctrl sequence
FLFGAPNSMKATVGKSDRTKRDTIRKSEVKVYIISINKDIEIKDESEFLSDIVIRGSQIIKTLDKNMKSMCLHNPILRSKPYHVR

SEQ ID NO: 44928 - protein, 85 aa, unidentified
  REGION 1..85: note = Description of Unknown:random_neg_ctrl neg_ctrl sequence
RGKLKTGRLKYPSVHSDVSAGNICKGAVEPRALQYLGPRKAIFLYEEFAKPSDIETHHGIRSIYITIAQWPGVSAIKPSEVETKE

SEQ ID NO: 44929 - protein, 85 aa, unidentified
  REGION 1..85: note = Description of Unknown:random_neg_ctrl neg_ctrl sequence
LRLLGMGWERSSFVIRSRTREGKICLQKHWSDNWDSLQARRLFNTLTWPPVLSKKKFIINRLIAKAILYAIIEEITPIGITVELD

SEQ ID NO: 44930 - protein, 85 aa, unidentified
  REGION 1..85: note = Description of Unknown:random_neg_ctrl neg_ctrl sequence
AVNPGYRNVIASVALDKSGVICEPKNSTGVPKTEGSNIFNSVLKYYSQKLPIIILDVTTNSTKGASPSPKYSENTLNAKGVFEQH

SEQ ID NO: 44931 - protein, 85 aa, unidentified
  REGION 1..85: note = Description of Unknown:random_neg_ctrl neg_ctrl sequence
CTAITSDQFERAGGEALYTIPLKVNKARVLSTRILEDTYGYMKDVFERFDCVFIIGAASAKGRIELKDLPKLKLSEETILSIMKW

SEQ ID NO: 44932 - protein, 85 aa, unidentified
  REGION 1..85: note = Description of Unknown:random_neg_ctrl neg_ctrl sequence
KAQNDQNPYLYNMGLREGGSIEGPLFLLYKPVFVISDVFSPGHIYIKGVGLPENQTTFVPNIYGVGHIKYKGKTKSTYVGEAYTE

SEQ ID NO: 44933 - protein, 85 aa, unidentified
  REGION 1..85: note = Description of Unknown:random_neg_ctrl neg_ctrl sequence
PAINATKAYIGREGEDTIRSAKLNAIRVQSENCAFSINTTPTRLPGIFPDKTLYSIEKPVFGSSITHEFNKNRIAIDSQDAATIS

SEQ ID NO: 44934 - protein, 85 aa, unidentified
  REGION 1..85: note = Description of Unknown:random_neg_ctrl neg_ctrl sequence
SKLVSGAHGFFDTLAVYSADYLQGCINLKNIQGDFLFGELKNIQLCEDKETKMFLERIIGKFLIAYLSSNVFGGIELKDIPKYSA

SEQ ID NO: 44935 - protein, 85 aa, unidentified
  REGION 1..85: note = Description of Unknown:random_neg_ctrl neg_ctrl sequence
KRSDDLNGNKIDTQVPALILEFAELNCSSRDYLEQVEGFCLIFILMESFPYPFAEDREHEDYTGERIATMVKAGTQGKAVLMVTS

SEQ ID NO: 44936 - protein, 85 aa, unidentified
  REGION 1..85: note = Description of Unknown:random_neg_ctrl neg_ctrl sequence
KRFLSRSRCVKHRNSEGLFDTKPSAAEANNLEYHHLYFLGIPELAPITDESPFMGPVNGGLLNAAAEQTNDLVVEKGPEFVPALS

SEQ ID NO: 44937 - protein, 85 aa, unidentified
  REGION 1..85: note = Description of Unknown:random_neg_ctrl neg_ctrl sequence
KFVAAIYTKDVKTIIIKIDRPWYYSIGTATSTQASYKLATKVFNVLDLDLEGRSSGPRMLNEITTQKITNQLWHSTPEYNIYWLI

SEQ ID NO: 44938 - protein, 85 aa, unidentified
  REGION 1..85: note = Description of Unknown:random_neg_ctrl neg_ctrl sequence
NLCFSMYRYAELLLHEHVKLALRFSTVFGEVGWNRMANTLSESGMYDGIYSMLKLEQYNKGIVDNMVSVKARMYPVMTTDPLLDY

SEQ ID NO: 44939 - protein, 85 aa, unidentified
  REGION 1..85: note = Description of Unknown:random_neg_ctrl neg_ctrl sequence
NVGRTYLVYSLILTILKQAGWKKAGTYKKHVFIKREWKFAANWTLEPLLYLTFKEPLEECLGCNAQKRDVYFESDDDFKVRSKLE

SEQ ID NO: 44940 - protein, 85 aa, unidentified
  REGION 1..85: note = Description of Unknown:random_neg_ctrl neg_ctrl sequence
GFDEYMFCLEIIKYRNKYGVDTSYEDSSREDIFTTITLYAAIVLVVLQPIYFKIDGRTIGPSVDGQTRTGSEEAKYIVSAHDTIW

SEQ ID NO: 44941 - protein, 84 aa, unidentified
  REGION 1..84: note = Description of Unknown:random_neg_ctrl neg_ctrl sequence
SKVNKPDGQPTYSNFLLNELERTFLENVVPEICIKLEYKGYEYRSVCIALNEISQKTIHITNDKLPKLFEIHFSDIATACREPY

SEQ ID NO: 44942 - protein, 85 aa, unidentified
  REGION 1..85: note = Description of Unknown:random_neg_ctrl neg_ctrl sequence
SPRANKSIKGTKNDAPHMEKTPNSTKYLNTEINKYKLEDYVMGGLISFFYTADTTIVSYGQQVANEEVPLHYLNAEPSQLLLDDR

SEQ ID NO: 44943 - protein, 85 aa, unidentified
  REGION 1..85: note = Description of Unknown:random_neg_ctrl neg_ctrl sequence
NLSIIPFFNKSKFKPEELLIAEETSYQDKINSDSPENDNLMDVCSHILYAEDPGNKKNTSGWYSEPLKINKPMMCINAILMCVLE

SEQ ID NO: 44944 - protein, 85 aa, unidentified
  REGION 1..85: note = Description of Unknown:random_neg_ctrl neg_ctrl sequence
LKTACLEFKTFDATKEALGIARNGLPDYGISPKDGYLDMGLTQRSKTAKHNEEEISGGPEIPSVYMTYAVSFEKTRGIYTSDFAL

SEQ ID NO: 44945 - protein, 85 aa, unidentified
  REGION 1..85: note = Description of Unknown:random_neg_ctrl neg_ctrl sequence
AGVGIRKTPVYCVRLGIDTSPKTAEIYELTDMAYCGESLEGALKAKHGSGYKIILFDTMREYHENIFVYSYPIIDVVGFKVKKFW

SEQ ID NO: 44946 - protein, 85 aa, unidentified
  REGION 1..85: note = Description of Unknown:random_neg_ctrl neg_ctrl sequence
LSFISYFNLGNMYAQVDRGKNKDMGPAILNLSIFSHDQTQDEELDLGPYFFQPRIKVLEDPFMVAGAPEKIIGESKQELSCCAKA

SEQ ID NO: 44947 - protein, 84 aa, unidentified
  REGION 1..84: note = Description of Unknown:random_neg_ctrl neg_ctrl sequence
PMMFDNYRQFNDSEQKLKSDGIEDSKLLILYYLVTPISLGFEAANIAPNDVGVASRSPRSGRIDLNLKLAIGGGTLPGITGFAN

SEQ ID NO: 44948 - protein, 85 aa, unidentified
  REGION 1..85: note = Description of Unknown:random_neg_ctrl neg_ctrl sequence
VSPVQRHVINMYRMSPFLVLPPIEATRNILNLILRKTSLIKVHVVAGAFFISRICNDLTTKWIILYKGKGQCKGMKSSYRVFTEM

SEQ ID NO: 44949 - protein, 85 aa, unidentified
  REGION 1..85: note = Description of Unknown:random_neg_ctrl neg_ctrl sequence
FLLYLISGGGFHHIFLSDPRIILHESGKWSGLPLPGIATGSLRSPYEELENDTHMIETILSCLYKNRGRQIQLEWGIVNVYPLTK

SEQ ID NO: 44950 - protein, 85 aa, unidentified
  REGION 1..85: note = Description of Unknown:random_neg_ctrl neg_ctrl sequence
LIYHSVSKLTLTKKIGGGPWILPYDLGLENKLLRLNAKMPTIVMIGQLLDRASVGILTTISSAGRGAWEVENPFIVIGTNTPLTL

SEQ ID NO: 44951 - protein, 85 aa, unidentified
  REGION 1..85: note = Description of Unknown:random_neg_ctrl neg_ctrl sequence
KDINLGTIKRDISDKPHKYEITSHNRGYLKQMDTKQLSAYEAKLSEDVGNRVLFDELTPDVTYTFRALLNADTNILGLKVISIVF

SEQ ID NO: 44952 - protein, 85 aa, unidentified
  REGION 1..85: note = Description of Unknown:random_neg_ctrl neg_ctrl sequence
RAVINTWVRHDLKCALITAEEYVAKAHARFNYRYDNKFYGDSEYVNIPLEDTLTLKVISASALDVVRALLSINNDSLLRHGVDKA

SEQ ID NO: 44953 - protein, 85 aa, unidentified
  REGION 1..85: note = Description of Unknown:random_neg_ctrl neg_ctrl sequence
SGMTVLPSIVRKVVVGKAEPGVTAEGTFVLVTYTTNGYDLKIIIISVANIVDPPARTTFDVPVAGVIVPSSSYYFNSGYYAFGSL

SEQ ID NO: 44954 - protein, 85 aa, unidentified; identical to SEQ ID NO: 14782
  REGION 1..85: note = Description of Unknown:ENSG00000167994 known_neg_ctrl sequence

SEQ ID NO: 44955 - protein, 85 aa, unidentified; identical to SEQ ID NO: 14783
  REGION 1..85: note = Description of Unknown:ENSG00000167994 known_neg_ctrl sequence

SEQ ID NO: 44956 - protein, 85 aa, unidentified; identical to SEQ ID NO: 14784
  REGION 1..85: note = Description of Unknown:ENSG00000167994 known_neg_ctrl sequence

SEQ ID NO: 44957 - protein, 85 aa, unidentified; identical to SEQ ID NO: 14785
  REGION 1..85: note = Description of Unknown:ENSG00000167994 known_neg_ctrl sequence

SEQ ID NO: 44958 - protein, 84 aa, unidentified; identical to SEQ ID NO: 14786
  REGION 1..84: note = Description of Unknown:ENSG00000167994 known_neg_ctrl sequence

SEQ ID NO: 44959 - protein, 85 aa, unidentified
  REGION 1..85: note = Description of Unknown:ENSG00000167994 known_neg_ctrl sequence
YAPSGLCPVLEGNLREEPWGTDSPPQPDQGLPPPLAAVPVPWKSTDPCQGHRESPGALVETSAGEEAQGQEGPAAAQLDVLRLRS

SEQ ID NO: 44960 - protein, 85 aa, unidentified
  REGION 1..85: note = Description of Unknown:ENSG00000167994 known_neg_ctrl sequence
SSMEIREKGSEFLKEELHRAQKELKLKDEECERLSKVREQLEQELEELTASLFEEAHKMVREANMKQAASEKQLKEARGKVDTIL

SEQ ID NO: 44961 - protein, 85 aa, unidentified
  REGION 1..85: note = Description of Unknown:ENSG00000167994 known_neg_ctrl sequence
FAEFQAWRESPTLDKTCPFLERVYREDVGPCLDFTMQELSVLVRAAVEDNTLTIEPVASQTLPTVKVAEVDCSSTNTCALSGLTR

SEQ ID NO: 44962 - protein, 85 aa, unidentified
  REGION 1..85: note = Description of Unknown:ENSG00000168830 known_neg_ctrl sequence
NITNCTTEASMAIRPKTITEKMLICMTLVVITTLTTLLNLAVIMAIGTTKKLHQPANYLICSLAVTDLLVAVLVMPLSIIYIVMD

SEQ ID NO: 44963 - protein, 85 aa, unidentified
  REGION 1..85: note = Description of Unknown:ENSG00000168830 known_neg_ctrl sequence
RWKLGYFLCEVWLSVDMTCCTCSILHLCVIALDRYWAITNAIEYARKRTAKRAALMILTVWTISIFISMPPLFWRSHRRLSPPPS

SEQ ID NO: 44964 - protein, 85 aa, unidentified
  REGION 1..85: note = Description of Unknown:ENSG00000168830 known_neg_ctrl sequence
QCTIQHDHVIYTIYSTLGAFYIPLTLILILYYRIYHAAKSLYQKRGSSRHLSNRSTDSQNSFASCKLTQTFCVSDFSTSDPTTEF

SEQ ID NO: 44965 - protein, 85 aa, unidentified
  REGION 1..85: note = Description of Unknown:ENSG00000168830 known_neg_ctrl sequence
EKFHASIRIPPFDNDLDHPGERQQISSTRERKAARILGLILGAFILSWLPFFIKELIVGLSIYTVSSEVADFLTWLGYVNSLINP

SEQ ID NO: 44966 - protein, 84 aa, unidentified
  REGION 1..84: note = Description of Unknown:ENSG00000168830 known_neg_ctrl sequence
SSTRERKAARILGLILGAFILSWLPFFIKELIVGLSIYTVSSEVADFLTWLGYVNSLINPLLYTSFNEDFKLAFKKLIRCREHT

SEQ ID NO: 44967 - protein, 85 aa, unidentified
  REGION 1..85: note = Description of Unknown:ENSG00000168830 known_neg_ctrl sequence
LVVITTLTTLLNLAVIMAIGTTKKLHQPANYLICSLAVTDLLVAVLVMPLSIIYIVMDRWKLGYFLCEVWLSVDMTCCTCSILHL

SEQ ID NO: 44968 - protein, 85 aa, unidentified
  REGION 1..85: note = Description of Unknown:ENSG00000168830 known_neg_ctrl sequence
CVIALDRYWAITNAIEYARKRTAKRAALMILTVWTISIFISMPPLFWRSHRRLSPPPSQCTIQHDHVIYTIYSTLGAFYIPLTLI

SEQ ID NO: 44969 - protein, 85 aa, unidentified
  REGION 1..85: note = Description of Unknown:ENSG00000168830 known_neg_ctrl sequence
LILYYRIYHAAKSLYQKRGSSRHLSNRSTDSQNSFASCKLTQTFCVSDFSTSDPTTEFEKFHASIRIPPFDNDLDHPGERQQISS

SEQ ID NO: 44970 - protein, 85 aa, unidentified
  REGION 1..85: note = Description of Unknown:ENSG00000173285 known_neg_ctrl sequence
EQVNKTVVREFVVLGFSSLARLQQLLFVIFLLLYLFTLGTNAIIISTIVLDRALHTPMYFFLAILSCSEICYTFVIVPKMLVDLL

SEQ ID NO: 44971 - protein, 85 aa, unidentified
  REGION 1..85: note = Description of Unknown:ENSG00000173285 known_neg_ctrl sequence
SQKKTISFLGCAIQMFSFLFFGSSHSFLLAAMGYDRYMAICNPLRYSVLMGHGVCMGLMAAACACGFTVSLVTTSLVFHLPFHSS

SEQ ID NO: 44972 - protein, 85 aa, unidentified
  REGION 1..85: note = Description of Unknown:ENSG00000173285 known_neg_ctrl sequence
NQLHHFFCDISPVLKLASQHSGFSQLVIFMLGVFALVIPLLLILVSYIRIISAILKIPSSVGRYKTFSTCASHLIVVTVHYSCAS

SEQ ID NO: 44973 - protein, 84 aa, unidentified
  REGION 1..84: note = Description of Unknown:ENSG00000173285 known_neg_ctrl sequence
SSVGRYKTFSTCASHLIVVTVHYSCASFIYLRPKTNYTSSQDTLISVSYTILTPLFNPMIYSLRNKEFKSALRRTIGQTFYPLS

SEQ ID NO: 44974 - protein, 85 aa, unidentified
  REGION 1..85: note = Description of Unknown:ENSG00000173285 known_neg_ctrl sequence
VIFLLLYLFTLGTNAIIISTIVLDRALHTPMYFFLAILSCSEICYTFVIVPKMLVDLLSQKKTISFLGCAIQMFSFLFFGSSHSF

SEQ ID NO: 44975 - protein, 85 aa, unidentified
  REGION 1..85: note = Description of Unknown:ENSG00000173285 known_neg_ctrl sequence
LLAAMGYDRYMAICNPLRYSVLMGHGVCMGLMAAACACGFTVSLVTTSLVFHLPFHSSNQLHHFFCDISPVLKLASQHSGFSQLV

SEQ ID NO: 44976 - protein, 85 aa, unidentified
  REGION 1..85: note = Description of Unknown:ENSG00000173285 known_neg_ctrl sequence
IFMLGVFALVIPLLLILVSYIRIISAILKIPSSVGRYKTFSTCASHLIVVTVHYSCASFIYLRPKTNYTSSQDTLISVSYTILTP

SEQ ID NO: 44977 - protein, 85 aa, unidentified
  REGION 1..85: note = Description of Unknown:ENSG00000147246 known_neg_ctrl sequence
VNLRNAVHSFLVHLIGLLVWQSDISVSPVAAIVTDIFNTSDGGRFKFPDGVQNWPALSIVIIIIMTIGGNILVIMAVSMEKKLHN

SEQ ID NO: 44978 - protein, 85 aa, unidentified
  REGION 1..85: note = Description of Unknown:ENSG00000147246 known_neg_ctrl sequence
ATNYFLMSLAIADMLVGLLVMPLSLLAILYDYVWPLPRYLCPVWISLDVLFSTASIMHLCAISLDRYVAIRNPIEHSRFNSRTKA

SEQ ID NO: 44979 - protein, 85 aa, unidentified
  REGION 1..85: note = Description of Unknown:ENSG00000147246 known_neg_ctrl sequence
IMKIAIVWAISIGVSVPIPVIGLRDEEKVFVNNTTCVLNDPNFVLIGSFVAFFIPLTIMVITYCLTIYVLRRQALMLLHGHTEEP

SEQ ID NO: 44980 - protein, 85 aa, unidentified
  REGION 1..85: note = Description of Unknown:ENSG00000147246 known_neg_ctrl sequence
PGLSLDFLKCCKRNTAEEENSANPNQDQNARRRKKKERRPRGTMQAINNERKASKVLGIVFFVFLIMWCPFFITNILSVLCEKSC

SEQ ID NO: 44981 - protein, 85 aa, unidentified
  REGION 1..85: note = Description of Unknown:ENSG00000147246 known_neg_ctrl sequence
NQKLMEKLLNVFVWIGYVCSGINPLVYTLFNKIYRRAFSNYLRCNYKVEKKPPVRQIPRVAATALSGRELNVNIYRHTNEPVIEK

SEQ ID NO: 44982 - protein, 84 aa, unidentified
  REGION 1..84: note = Description of Unknown:ENSG00000147246 known_neg_ctrl sequence
YRRAFSNYLRCNYKVEKKPPVRQIPRVAATALSGRELNVNIYRHTNEPVIEKASDNEPGIEMQVENLELPVNPSSVVSERISSV

SEQ ID NO: 44983 - protein, 85 aa, unidentified
  REGION 1..85: note = Description of Unknown:ENSG00000147246 known_neg_ctrl sequence
PVAAIVTDIFNTSDGGRFKFPDGVQNWPALSIVIIIIMTIGGNILVIMAVSMEKKLHNATNYFLMSLAIADMLVGLLVMPLSLLA

SEQ ID NO: 44984 - protein, 85 aa, unidentified
  REGION 1..85: note = Description of Unknown:ENSG00000147246 known_neg_ctrl sequence
ILYDYVWPLPRYLCPVWISLDVLFSTASIMHLCAISLDRYVAIRNPIEHSRFNSRTKAIMKIAIVWAISIGVSVPIPVIGLRDEE

SEQ ID NO: 44985 - protein, 85 aa, unidentified
  REGION 1..85: note = Description of Unknown:ENSG00000147246 known_neg_ctrl sequence
KVFVNNTTCVLNDPNFVLIGSFVAFFIPLTIMVITYCLTIYVLRRQALMLLHGHTEEPPGLSLDFLKCCKRNTAEEENSANPNQD

SEQ ID NO: 44986 - protein, 85 aa, unidentified
  REGION 1..85: note = Description of Unknown:ENSG00000147246 known_neg_ctrl sequence
QNARRRKKKERRPRGTMQAINNERKASKVLGIVFFVFLIMWCPFFITNILSVLCEKSCNQKLMEKLLNVFVWIGYVCSGINPLVY

SEQ ID NO: 44987 - protein, 85 aa, unidentified
  REGION 1..85: note = Description of Unknown:ENSG00000147246 known_neg_ctrl sequence
TLFNKIYRRAFSNYLRCNYKVEKKPPVRQIPRVAATALSGRELNVNIYRHTNEPVIEKASDNEPGIEMQVENLELPVNPSSVVSE

SEQ ID NO: 44988 - protein, 85 aa, unidentified; identical to SEQ ID NO: 14998
  REGION 1..85: note = Description of Unknown:ENSG00000099904 known_neg_ctrl sequence

SEQ ID NO: 44989 - protein, 85 aa, unidentified; identical to SEQ ID NO: 15054
  REGION 1..85: note = Description of Unknown:ENSG00000099904 known_neg_ctrl sequence

SEQ ID NO: 44990 - protein, 85 aa, unidentified
  REGION 1..85: note = Description of Unknown:ENSG00000099904 known_neg_ctrl sequence
LNHAEGLGAAHTTITMAVMCVAGLFFIPVIGLTGFHVVLVTRGRTTNEQVTGKFRGGVNPFTRGCCGNVEHVLCSPLAPRYVVEP

SEQ ID NO: 44991 - protein, 85 aa, unidentified; identical to SEQ ID NO: 15056
  REGION 1..85: note = Description of Unknown:ENSG00000099904 known_neg_ctrl sequence

SEQ ID NO: 44992 - protein, 85 aa, unidentified
  REGION 1..85: note = Description of Unknown:ENSG00000099904 known_neg_ctrl sequence
LSVQRTSPPTPAMYKFRPAFPTGPKVPFCGPGEQVPGPDSLTLGDDSIRSLDFVSEPSLDLPDYGPGGLHAAYPPSPPLSASDAF

SEQ ID NO: 44993 - protein, 85 aa, unidentified; identical to SEQ ID NO: 15058
  REGION 1..85: note = Description of Unknown:ENSG00000099904 known_neg_ctrl sequence

SEQ ID NO: 44994 - protein, 85 aa, unidentified; identical to SEQ ID NO: 15059
  REGION 1..85: note = Description of Unknown:ENSG00000099904 known_neg_ctrl sequence

SEQ ID NO: 44995 - protein, 85 aa, unidentified; identical to SEQ ID NO: 15060
  REGION 1..85: note = Description of Unknown:ENSG00000099904 known_neg_ctrl sequence

SEQ ID NO: 44996 - protein, 84 aa, unidentified; identical to SEQ ID NO: 15005
  REGION 1..84: note = Description of Unknown:ENSG00000099904 known_neg_ctrl sequence

SEQ ID NO: 44997 - protein, 85 aa, unidentified
  REGION 1..85: note = Description of Unknown:ENSG00000099904 known_neg_ctrl sequence
TLFFVFTCPWLTRAVSPAVPVYNGIIFLFVLANFSMATFMDPGVFPRADEDEDKEDDFRAPLYKNVDVRGIQVRMKWCATCHFYR

SEQ ID NO: 44998 - protein, 85 aa, unidentified
  REGION 1..85: note = Description of Unknown:ENSG00000099904 known_neg_ctrl sequence
PPRCSHCSVCDNCVEDFDHHCPWVNNCIGRRNYRYFFLFLLSLSAHMVGVVAFGLVYVLNHAEGLGAAHTTITMAVMCVAGLFFI

SEQ ID NO: 44999 - protein, 85 aa, unidentified
  REGION 1..85: note = Description of Unknown:ENSG00000099904 known_neg_ctrl sequence
PVIGLTGFHVVLVTRGRTTNEQVTGKFRGGVNPFTRGCCGNVEHVLCSPLAPRYVVEPPRLPLAVSLKPPFLRPELLDRAAPLKV

SEQ ID NO: 45000 - protein, 85 aa, unidentified
  REGION 1..85: note = Description of Unknown:ENSG00000099904 known_neg_ctrl sequence
KLSDNGLKAGLGRSKSKGSLDRLDEKPLDLGPPLPPKIEAGTFSSDLQTPRPGSAESALSVQRTSPPTPAMYKFRPAFPTGPKVP

SEQ ID NO: 45001 - protein, 85 aa, unidentified
  REGION 1..85: note = Description of Unknown:ENSG00000099904 known_neg_ctrl sequence
FCGPGEQVPGPDSLTLGDDSIRSLDFVSEPSLDLPDYGPGGLHAAYPPSPPLSASDAFSGALRSLSLKASSRRGGDHVALQPLRS

SEQ ID NO: 45002 - protein, 85 aa, unidentified
  REGION 1..85: note = Description of Unknown:ENSG00000099904 known_neg_ctrl sequence
EGGPPTPHRSIFAPHALPNRNGSLSYDSLLNPGSPGGHACPAHPAVGVAGYHSPYLHPGATGDPPRPLPRSFSPVLGPRPREPSP

SEQ ID NO: 45003 - protein, 85 aa, unidentified
  REGION 1..85: note = Description of Unknown:ENSG00000099904 known_neg_ctrl sequence
VRYDNLSRTIMASIQERKDREERERLLRSQADSLFGDSGVYDAPSSYSLQQASVLSEGPRGPALRYGSRDDLVAGPGFGGARNPA

SEQ ID NO: 45004 - protein, 85 aa, unidentified
  REGION 1..85: note = Description of Unknown:ENSG00000099904 known_neg_ctrl sequence
LQTSLSSLSSSVSRAPRTSSSSLQADQASSNAPGPRPSSGSHRSPARQGLPSPPGTPHSPSYAGPKAVAFIHTDLPEPPPSLTVQ

SEQ ID NO: 45005 - protein, 85 aa, unidentified
  REGION 1..85: note = Description of Unknown:ENSG00000129048 known_neg_ctrl sequence
ALEQNQSTDYYYEENEMNGTYDYSQYELICIKEDVREFAKVFLPVFLTIVFVIGLAGNSMVVAIYAYYKKQRTKTDVYILNLAVA

SEQ ID NO: 45006 - protein, 85 aa, unidentified
  REGION 1..85: note = Description of Unknown:ENSG00000129048 known_neg_ctrl sequence
DLLLLFTLPFWAVNAVHGWVLGKIMCKITSALYTLNFVSGMQFLACISIDRYVAVTKVPSQSGVGKPCWIICFCVWMAAILLSIP

SEQ ID NO: 45007 - protein, 85 aa, unidentified
  REGION 1..85: note = Description of Unknown:ENSG00000129048 known_neg_ctrl sequence
QLVFYTVNDNARCIPIFPRYLGTSMKALIQMLEICIGFVVPFLIMGVCYFITARTLMKMPNIKISRPLKVLLTVVIVFIVTQLPY

SEQ ID NO: 45008 - protein, 85 aa, unidentified
  REGION 1..85: note = Description of Unknown:ENSG00000129048 known_neg_ctrl sequence
NIVKFCRAIDIIYSLITSCNMSKRMDIAIQVTESIALFHSCLNPILYVFMGASFKNYVMKVAKKYGSWRRQRQSVEEFPFDSEGP

SEQ ID NO: 45009 - protein, 84 aa, unidentified
  REGION 1..84: note = Description of Unknown:ENSG00000129048 known_neg_ctrl sequence
IIYSLITSCNMSKRMDIAIQVTESIALFHSCLNPILYVFMGASFKNYVMKVAKKYGSWRRQRQSVEEFPFDSEGPTEPTSTFSI

SEQ ID NO: 45010 - protein, 85 aa, unidentified
  REGION 1..85: note = Description of Unknown:ENSG00000129048 known_neg_ctrl sequence
LICIKEDVREFAKVFLPVFLTIVFVIGLAGNSMVVAIYAYYKKQRTKTDVYILNLAVADLLLLFTLPFWAVNAVHGWVLGKIMCK

SEQ ID NO: 45011 - protein, 85 aa, unidentified
  REGION 1..85: note = Description of Unknown:ENSG00000129048 known_neg_ctrl sequence
ITSALYTLNFVSGMQFLACISIDRYVAVTKVPSQSGVGKPCWIICFCVWMAAILLSIPQLVFYTVNDNARCIPIFPRYLGTSMKA

SEQ ID NO: 45012 - protein, 85 aa, unidentified
  REGION 1..85: note = Description of Unknown:ENSG00000129048 known_neg_ctrl sequence
LIQMLEICIGFVVPFLIMGVCYFITARTLMKMPNIKISRPLKVLLTVVIVFIVTQLPYNIVKFCRAIDIIYSLITSCNMSKRMDI

SEQ ID NO: 45013 - protein, 85 aa, unidentified; identical to SEQ ID NO: 14719
  REGION 1..85: note = Description of Unknown:ENSG00000173567 known_neg_ctrl sequence

SEQ ID NO: 45014 - protein, 85 aa, unidentified; identical to SEQ ID NO: 14720
  REGION 1..85: note = Description of Unknown:ENSG00000173567 known_neg_ctrl sequence

SEQ ID NO: 45015 - protein, 85 aa, unidentified; identical to SEQ ID NO: 14721
  REGION 1..85: note = Description of Unknown:ENSG00000173567 known_neg_ctrl sequence

SEQ ID NO: 45016 - protein, 85 aa, unidentified; identical to SEQ ID NO: 14722
  REGION 1..85: note = Description of Unknown:ENSG00000173567 known_neg_ctrl sequence

SEQ ID NO: 45017 - protein, 85 aa, unidentified; identical to SEQ ID NO: 14723
  REGION 1..85: note = Description of Unknown:ENSG00000173567 known_neg_ctrl sequence

SEQ ID NO: 45018 - protein, 85 aa, unidentified; identical to SEQ ID NO: 14724
  REGION 1..85: note = Description of Unknown:ENSG00000173567 known_neg_ctrl sequence

SEQ ID NO: 45019 - protein, 85 aa, unidentified; identical to SEQ ID NO: 14725
  REGION 1..85: note = Description of Unknown:ENSG00000173567 known_neg_ctrl sequence

SEQ ID NO: 45020 - protein, 85 aa, unidentified; identical to SEQ ID NO: 14726
  REGION 1..85: note = Description of Unknown:ENSG00000173567 known_neg_ctrl sequence

SEQ ID NO: 45021 - protein, 85 aa, unidentified; identical to SEQ ID NO: 14727
  REGION 1..85: note = Description of Unknown:ENSG00000173567 known_neg_ctrl sequence

SEQ ID NO: 45022 - protein, 85 aa, unidentified; identical to SEQ ID NO: 14728
  REGION 1..85: note = Description of Unknown:ENSG00000173567 known_neg_ctrl sequence

SEQ ID NO: 45023 - protein, 85 aa, unidentified; identical to SEQ ID NO: 14729
  REGION 1..85: note = Description of Unknown:ENSG00000173567 known_neg_ctrl sequence

SEQ ID NO: 45024 - protein, 85 aa, unidentified; identical to SEQ ID NO: 14730
  REGION 1..85: note = Description of Unknown:ENSG00000173567 known_neg_ctrl sequence

SEQ ID NO: 45025 - protein, 84 aa, unidentified; identical to SEQ ID NO: 14731
  REGION 1..84: note = Description of Unknown:ENSG00000173567 known_neg_ctrl sequence

SEQ ID NO: 45026 - protein, 85 aa, unidentified
  REGION 1..85: note = Description of Unknown:ENSG00000173567 known_neg_ctrl sequence
VSETGVRPREGLQRRQWGPLIGRDKAWNERIDRPFPACPIPLSSSFGRWPKGQTMWAQTSTLTLTEEELGQSQAGGESGSGQLLD

SEQ ID NO: 45027 - protein, 85 aa, unidentified
  REGION 1..85: note = Description of Unknown:ENSG00000173567 known_neg_ctrl sequence
QENGAGESALVSVYVHLDFPDKTWPPELSRTLTLPAASASSSPRPLLTGLRLTTECNVNHKGNFYCACLSGYQWNTSICLHYPPC

SEQ ID NO: 45028 - protein, 85 aa, unidentified
  REGION 1..85: note = Description of Unknown:ENSG00000173567 known_neg_ctrl sequence
QSLHNHQPCGCLVFSHPEPGYCQLLPPGSPVTCLPAVPGILNLNSQLQMPGDTLSLTLHLSQEATNLSWFLRHPGSPSPILLQPG

SEQ ID NO: 45029 - protein, 85 aa, unidentified
  REGION 1..85: note = Description of Unknown:ENSG00000173567 known_neg_ctrl sequence
TQVSVTSSHGQAALSVSNMSHHWAGEYMSCFEAQGFKWNLYEVVRVPLKATDVARLPYQLSISCATSPGFQLSCCIPSTNLAYTA

SEQ ID NO: 45030 - protein, 85 aa, unidentified
  REGION 1..85: note = Description of Unknown:ENSG00000173567 known_neg_ctrl sequence
AWSPGEGSKASSFNESGSQCFVLAVQRCPMADTTYACDLQSLGLAPLRVPISITIIQDGDITCPEDASVLTWNVTKAGHVAQAPC

SEQ ID NO: 45031 - protein, 85 aa, unidentified
  REGION 1..85: note = Description of Unknown:ENSG00000173567 known_neg_ctrl sequence
PESKRGIVRRLCGADGVWGPVHSSCTDARLLALFTRTKLLQAGQGSPAEEVPQILAQLPGQAAEASSPSDLLTLLSTMKYVAKVV

SEQ ID NO: 45032 - protein, 85 aa, unidentified
  REGION 1..85: note = Description of Unknown:ENSG00000173567 known_neg_ctrl sequence
AEARIQLDRRALKNLLIATDKVLDMDTRSLWTLAQARKPWAGSTLLLAVETLACSLCPQDHPFAFSLPNVLLQSQLFGPTFPADY

SEQ ID NO: 45033 - protein, 85 aa, unidentified
  REGION 1..85: note = Description of Unknown:ENSG00000173567 known_neg_ctrl sequence
SISFPTRPPLQAQIPRHSLAPLVRNGTEISITSLVLRKLDHLLPSNYGQGLGDSLYATPGLVLVISIMAGDRAFSQGEVIMDFGN

SEQ ID NO: 45034 - protein, 85 aa, unidentified
  REGION 1..85: note = Description of Unknown:ENSG00000173567 known_neg_ctrl sequence
TDGSPHCVFWDHSLFQGRGGWSKEGCQAQVASASPTAQCLCQHLTAFSVLMSPHTVPEEPALALLTQVGLGASILALLVCLGVYW

SEQ ID NO: 45035 - protein, 85 aa, unidentified
  REGION 1..85: note = Description of Unknown:ENSG00000173567 known_neg_ctrl sequence
LVWRVVVRNKISYFRHAALLNMVFCLLAADTCFLGAPFLSPGPRSPLCLAAAFLCHFLYLATFFWMLAQALVLAHQLLFVFHQLA

SEQ ID NO: 45036 - protein, 85 aa, unidentified
  REGION 1..85: note = Description of Unknown:ENSG00000173567 known_neg_ctrl sequence
KHRVLPLMVLLGYLCPLGLAGVTLGLYLPQGQYLREGECWLDGKGGALYTFVGPVLAIIGVNGLVLAMAMLKLLRPSLSEGPPAE

SEQ ID NO: 45037 - protein, 85 aa, unidentified
  REGION 1..85: note = Description of Unknown:ENSG00000173567 known_neg_ctrl sequence
KRQALLGVIKALLILTPIFGLTWGLGLATLLEEVSTVPHYIFTILNTLQGVFILLFGCLMDRKIQEALRKRFCRAQAPSSTISLV

SEQ ID NO: 45038 - protein, 85 aa, unidentified
  REGION 1..85: note = Description of Unknown:ENSG00000169006 known_neg_ctrl sequence
ETSSPRPPRPSSNPGLSLDARLGVDTRLWAKVLFTALYALIWALGAAGNALSAHVVLKARAGRAGRLRHHVLSLALAGLLLLLVG

SEQ ID NO: 45039 - protein, 85 aa, unidentified
  REGION 1..85: note = Description of Unknown:ENSG00000169006 known_neg_ctrl sequence
VPVELYSFVWFHYPWVFGDLGCRGYYFVHELCAYATVLSVAGLSAERCLAVCQPLRARSLLTPRRTRWLVALSWAASLGLALPMA

SEQ ID NO: 45040 - protein, 85 aa, unidentified
  REGION 1..85: note = Description of Unknown:ENSG00000169006 known_neg_ctrl sequence
VIMGQKHELETADGEPEPASRVCTVLVSRTALQVFIQVNVLVSFVLPLALTAFLNGVTVSHLLALCSQVPSTSTPGSSTPSRLEL

SEQ ID NO: 45041 - protein, 85 aa, unidentified
  REGION 1..85: note = Description of Unknown:ENSG00000169006 known_neg_ctrl sequence
LSEEGLLSFIVWKKTFIQGGQVSLVRHKDVRRIRSLQRSVQVLRAIVVMYVICWLPYHARRLMYCYVPDDAWTDPLYNFYHYFYM

SEQ ID NO: 45042 - protein, 84 aa, unidentified
  REGION 1..84: note = Description of Unknown:ENSG00000169006 known_neg_ctrl sequence
AWTDPLYNFYHYFYMVTNTLFYVSSAVTPLLYNAVSSSFRKLFLEAVSSLCGEHHPMKRLPPKPQSPTLMDTASGFGDPPETRT

SEQ ID NO: 45043 - protein, 85 aa, unidentified
  REGION 1..85: note = Description of Unknown:ENSG00000169006 known_neg_ctrl sequence
LWAKVLFTALYALIWALGAAGNALSAHVVLKARAGRAGRLRHHVLSLALAGLLLLLVGVPVELYSFVWFHYPWVFGDLGCRGYYF

SEQ ID NO: 45044 - protein, 85 aa, unidentified
  REGION 1..85: note = Description of Unknown:ENSG00000169006 known_neg_ctrl sequence
VHELCAYATVLSVAGLSAERCLAVCQPLRARSLLTPRRTRWLVALSWAASLGLALPMAVIMGQKHELETADGEPEPASRVCTVLV

SEQ ID NO: 45045 - protein, 85 aa, unidentified
  REGION 1..85: note = Description of Unknown:ENSG00000169006 known_neg_ctrl sequence
SRTALQVFIQVNVLVSFVLPLALTAFLNGVTVSHLLALCSQVPSTSTPGSSTPSRLELLSEEGLLSFIVWKKTFIQGGQVSLVRH

SEQ ID NO: 45046 - protein, 85 aa, unidentified
  REGION 1..85: note = Description of Unknown:ENSG00000169006 known_neg_ctrl sequence
KDVRRIRSLQRSVQVLRAIVVMYVICWLPYHARRLMYCYVPDDAWTDPLYNFYHYFYMVTNTLFYVSSAVTPLLYNAVSSSFRKL

SEQ ID NO: 45047 - protein, 85 aa, unidentified
  REGION 1..85: note = Description of Unknown:ENSG00000148680 known_neg_ctrl sequence
MDVNSSGRPDLYGHLRSFLLPEVGRGLPDLSPDGGADPVAGSWAPHLLSEVTASPAPTWDAPPDNASGCGEQINYGRVEKVVIGS

SEQ ID NO: 45048 - protein, 85 aa, unidentified
  REGION 1..85: note = Description of Unknown:ENSG00000148680 known_neg_ctrl sequence
ILTLITLLTIAGNCLVVISVCFVKKLRQPSNYLIVSLALADLSVAVAVMPFVSVTDLIGGKWIFGHFFCNVFIAMDVMCCTASIM

SEQ ID NO: 45049 - protein, 85 aa, unidentified
  REGION 1..85: note = Description of Unknown:ENSG00000148680 known_neg_ctrl sequence
TLCVISIDRYLGITRPLTYPVRQNGKCMAKMILSVWLLSASITLPPLFGWAQNVNDDKVCLISQDFGYTIYSTAVAFYIPMSVML

SEQ ID NO: 45050 - protein, 85 aa, unidentified
  REGION 1..85: note = Description of Unknown:ENSG00000148680 known_neg_ctrl sequence
FMYYQIYKAARKSAAKHKFPGFPRVEPDSVIALNGIVKLQKEVEECANLSRLLKHERKNISIFKREQKAATTLGIIVGAFTVCWL

SEQ ID NO: 45051 - protein, 85 aa, unidentified
  REGION 1..85: note = Description of Unknown:ENSG00000148680 known_neg_ctrl sequence
PFFLLSTARPFICGTSCSCIPLWVERTFLWLGYANSLINPFIYAFFNRDLRTTYRSLLQCQYRNINRKLSAAGMHEALKLAERPE

SEQ ID NO: 45052 - protein, 84 aa, unidentified
  REGION 1..84: note = Description of Unknown:ENSG00000148680 known_neg_ctrl sequence
PLWVERTFLWLGYANSLINPFIYAFFNRDLRTTYRSLLQCQYRNINRKLSAAGMHEALKLAERPERPEFVLQNADYCRKKGHDS

SEQ ID NO: 45053 - protein, 85 aa, unidentified
  REGION 1..85: note = Description of Unknown:ENSG00000148680 known_neg_ctrl sequence
PDLSPDGGADPVAGSWAPHLLSEVTASPAPTWDAPPDNASGCGEQINYGRVEKVVIGSILTLITLLTIAGNCLVVISVCFVKKLR

SEQ ID NO: 45054 - protein, 85 aa, unidentified
  REGION 1..85: note = Description of Unknown:ENSG00000148680 known_neg_ctrl sequence
QPSNYLIVSLALADLSVAVAVMPFVSVTDLIGGKWIFGHFFCNVFIAMDVMCCTASIMTLCVISIDRYLGITRPLTYPVRQNGKC

SEQ ID NO: 45055 - protein, 85 aa, unidentified
  REGION 1..85: note = Description of Unknown:ENSG00000148680 known_neg_ctrl sequence
MAKMILSVWLLSASITLPPLFGWAQNVNDDKVCLISQDFGYTIYSTAVAFYIPMSVMLFMYYQIYKAARKSAAKHKFPGFPRVEP

SEQ ID NO: 45056 - protein, 85 aa, unidentified
  REGION 1..85: note = Description of Unknown:ENSG00000148680 known_neg_ctrl sequence
DSVIALNGIVKLQKEVEECANLSRLLKHERKNISIFKREQKAATTLGIIVGAFTVCWLPFFLLSTARPFICGTSCSCIPLWVERT

SEQ ID NO: 45057 - protein, 84 aa, unidentified
  REGION 1..84: note = Description of Unknown:ENSG00000148680 known_neg_ctrl sequence
RSLLQCQYRNINRKLSAAGMHEALKLAERPERPEFVLRACTRRVLLRPEKRPPVSVWVLQSPDHHNWLADKMLTTVEKKVMIHD

SEQ ID NO: 45058 - protein, 85 aa, unidentified
  REGION 1..85: note = Description of Unknown:ENSG00000148680 known_neg_ctrl sequence
FLWLGYANSLINPFIYAFFNRDLRTTYRSLLQCQYRNINRKLSAAGMHEALKLAERPERPEFVLRACTRRVLLRPEKRPPVSVWV

SEQ ID NO: 45059 - protein, 85 aa, unidentified
  REGION 1..85: note = Description of Unknown:ENSG00000054277 known_neg_ctrl sequence
YSGNRSGGHGYWDGGGAAGAEGPAPAGTLSPAPLFSPGTYERLALLLGSIGLLGVGNNLLVLVLYYKFQRLRTPTHLLLVNISLS

SEQ ID NO: 45060 - protein, 85 aa, unidentified
  REGION 1..85: note = Description of Unknown:ENSG00000054277 known_neg_ctrl sequence
DLLVSLFGVTFTFVSCLRNGWVWDTVGCVWDGFSGSLFGIVSIATLTVLAYERYIRVVHARVINFSWAWRAITYIWLYSLAWAGA

SEQ ID NO: 45061 - protein, 85 aa, unidentified
  REGION 1..85: note = Description of Unknown:ENSG00000054277 known_neg_ctrl sequence
PLLGWNRYILDVHGLGCTVDWKSKDANDSSFVLFLFLGCLVVPLGVIAHCYGHILYSIRMLRCVEDLQTIQVIKILKYEKKLAKM

SEQ ID NO: 45062 - protein, 85 aa, unidentified
  REGION 1..85: note = Description of Unknown:ENSG00000054277 known_neg_ctrl sequence
CFLMIFTFLVCWMPYIVICFLVVNGHGHLVTPTISIVSYLFAKSNTVYNPVIYVFMIRKFRRSLLQLLCLRLLRCQRPAKDLPAA

SEQ ID NO: 45063 - protein, 84 aa, unidentified
  REGION 1..84: note = Description of Unknown:ENSG00000054277 known_neg_ctrl sequence
SLLQLLCLRLLRCQRPAKDLPAAGSEMQIRPIVMSQKDGDRPKKKVTFNSSSIIFIITSDESLSVDDSDKTNGSKVDVIQVRPL

SEQ ID NO: 45064 - protein, 85 aa, unidentified
  REGION 1..85: note = Description of Unknown:ENSG00000054277 known_neg_ctrl sequence
TLSPAPLFSPGTYERLALLLGSIGLLGVGNNLLVLVLYYKFQRLRTPTHLLLVNISLSDLLVSLFGVTFTFVSCLRNGWVWDTVG

SEQ ID NO: 45065 - protein, 85 aa, unidentified
  REGION 1..85: note = Description of Unknown:ENSG00000054277 known_neg_ctrl sequence
CVWDGFSGSLFGIVSIATLTVLAYERYIRVVHARVINFSWAWRAITYIWLYSLAWAGAPLLGWNRYILDVHGLGCTVDWKSKDAN

SEQ ID NO: 45066 - protein, 85 aa, unidentified
  REGION 1..85: note = Description of Unknown:ENSG00000054277 known_neg_ctrl sequence
DSSFVLFLFLGCLVVPLGVIAHCYGHILYSIRMLRCVEDLQTIQVIKILKYEKKLAKMCFLMIFTFLVCWMPYIVICFLVVNGHG

SEQ ID NO: 45067 - protein, 85 aa, unidentified
  REGION 1..85: note = Description of Unknown:ENSG00000054277 known_neg_ctrl sequence
HLVTPTISIVSYLFAKSNTVYNPVIYVFMIRKFRRSLLQLLCLRLLRCQRPAKDLPAAGSEMQIRPIVMSQKDGDRPKKKVTFNS

SEQ ID NO: 45068 - protein, 85 aa, unidentified
  REGION 1..85: note = Description of Unknown:ENSG00000121853 known_neg_ctrl sequence
WNATPSEEPGFNLTLADLDWDASPGNDSLGDELLQLFPAPLLAGVTATCVALFVVGIAGNLLTMLVVSRFRELRTTTNLYLSSMA

SEQ ID NO: 45069 - protein, 85 aa, unidentified
  REGION 1..85: note = Description of Unknown:ENSG00000121853 known_neg_ctrl sequence
FSDLLIFLCMPLDLVRLWQYRPWNFGDLLCKLFQFVSESCTYATVLTITALSVERYFAICFPLRAKVVVTKGRVKLVIFVIWAVA

SEQ ID NO: 45070 - protein, 85 aa, unidentified
  REGION 1..85: note = Description of Unknown:ENSG00000121853 known_neg_ctrl sequence
FCSAGPIFVLVGVEHENGTDPWDTNECRPTEFAVRSGLLTVMVWVSSIFFFLPVFCLTVLYSLIGRKLWRRRRGDAVVGASLRDQ

SEQ ID NO: 45071 - protein, 85 aa, unidentified
  REGION 1..85: note = Description of Unknown:ENSG00000121853 known_neg_ctrl sequence
NHKQTVKMLAVVVFAFILCWLPFHVGRYLFSKSFEPGSLEIAQISQYCNLVSFVLFYLSAAINPILYNIMSKKYRVAVFRLLGFE

SEQ ID NO: 45072 - protein, 84 aa, unidentified
  REGION 1..84: note = Description of Unknown:ENSG00000121853 known_neg_ctrl sequence
RYLFSKSFEPGSLEIAQISQYCNLVSFVLFYLSAAINPILYNIMSKKYRVAVFRLLGFEPFSQRKLSTLKDESSRAWTESSINT

SEQ ID NO: 45073 - protein, 85 aa, unidentified
  REGION 1..85: note = Description of Unknown:ENSG00000121853 known_neg_ctrl sequence
SLGDELLQLFPAPLLAGVTATCVALFVVGIAGNLLTMLVVSRFRELRTTTNLYLSSMAFSDLLIFLCMPLDLVRLWQYRPWNFGD

SEQ ID NO: 45074 - protein, 85 aa, unidentified
  REGION 1..85: note = Description of Unknown:ENSG00000121853 known_neg_ctrl sequence
LLCKLFQFVSESCTYATVLTITALSVERYFAICFPLRAKVVVTKGRVKLVIFVIWAVAFCSAGPIFVLVGVEHENGTDPWDTNEC

SEQ ID NO: 45075 - protein, 85 aa, unidentified
  REGION 1..85: note = Description of Unknown:ENSG00000121853 known_neg_ctrl sequence
RPTEFAVRSGLLTVMVWVSSIFFFLPVFCLTVLYSLIGRKLWRRRRGDAVVGASLRDQNHKQTVKMLAVVVFAFILCWLPFHVGR

SEQ ID NO: 45076 - protein, 85 aa, unidentified; identical to SEQ ID NO: 14914
  REGION 1..85: note = Description of Unknown:ENSG00000143627 known_neg_ctrl sequence

SEQ ID NO: 45077 - protein, 85 aa, unidentified; identical to SEQ ID NO: 14915
  REGION 1..85: note = Description of Unknown:ENSG00000143627 known_neg_ctrl sequence

SEQ ID NO: 45078 - protein, 85 aa, unidentified; identical to SEQ ID NO: 14916
  REGION 1..85: note = Description of Unknown:ENSG00000143627 known_neg_ctrl sequence

SEQ ID NO: 45079 - protein, 85 aa, unidentified; identical to SEQ ID NO: 14917
  REGION 1..85: note = Description of Unknown:ENSG00000143627 known_neg_ctrl sequence

SEQ ID NO: 45080 - protein, 85 aa, unidentified; identical to SEQ ID NO: 14918
  REGION 1..85: note = Description of Unknown:ENSG00000143627 known_neg_ctrl sequence

SEQ ID NO: 45081 - protein, 85 aa, unidentified; identical to SEQ ID NO: 14919
  REGION 1..85: note = Description of Unknown:ENSG00000143627 known_neg_ctrl sequence

SEQ ID NO: 45082 - protein, 84 aa, unidentified; identical to SEQ ID NO: 14920
  REGION 1..84: note = Description of Unknown:ENSG00000143627 known_neg_ctrl sequence

SEQ ID NO: 45083 - protein, 85 aa, unidentified
  REGION 1..85: note = Description of Unknown:ENSG00000143627 known_neg_ctrl sequence
IGAPGGPAGYLRRASVAQLTQELGTAFFQQQQLPAAMADTFLEHLCLLDIDSEPVAARSTSIIATIGPASRSVERLKEMIKAGMN

SEQ ID NO: 45084 - protein, 85 aa, unidentified
  REGION 1..85: note = Description of Unknown:ENSG00000143627 known_neg_ctrl sequence
IARLNFSHGSHEYHAESIANVREAVESFAGSPLSYRPVAIALDTKGPEIRTGILQGGPESEVELVKGSQVLVTVDPAFRTRGNAN

SEQ ID NO: 45085 - protein, 85 aa, unidentified
  REGION 1..85: note = Description of Unknown:ENSG00000143627 known_neg_ctrl sequence
TVWVDYPNIVRVVPVGGRIYIDDGLISLVVQKIGPEGLVTQVENGGVLGSRKGVNLPGAQVDLPGLSEQDVRDLRFGVEHGVDIV

SEQ ID NO: 45086 - protein, 85 aa, unidentified
  REGION 1..85: note = Description of Unknown:ENSG00000143627 known_neg_ctrl sequence
FASFVRKASDVAAVRAALGPEGHGIKIISKIENHEGVKRFDEILEVSDGIMVARGDLGIEIPAEKVFLAQKMMIGRCNLAGKPVV

SEQ ID NO: 45087 - protein, 85 aa, unidentified
  REGION 1..85: note = Description of Unknown:ENSG00000143627 known_neg_ctrl sequence
CATQMLESMITKPRPTRAETSDVANAVLDGADCIMLSGETAKGNFPVEAVKMQHAIAREAEAAVYHRQLFEELRRAAPLSRDPTE

SEQ ID NO: 45088 - protein, 85 aa, unidentified
  REGION 1..85: note = Description of Unknown:ENSG00000143627 known_neg_ctrl sequence
VTAIGAVEAAFKCCAAAIIVLTTTGRSAQLLSRYRPRAAVIAVTRSAQAARQVHLCRGVFPLLYREPPEAIWADDVDRRVQFGIE

SEQ ID NO: 45089 - protein, 85 aa, unidentified
  REGION 1..85: note = Description of Unknown:ENSG00000135973 known_neg_ctrl sequence
ACNSTSLEAYTYLLLNTSNASDSGSTQLPAPLRISLAIVMLLMTVVGFLGNTVVCIIVYQRPAMRSAINLLLATLAFSDIMLSLC

SEQ ID NO: 45090 - protein, 85 aa, unidentified
  REGION 1..85: note = Description of Unknown:ENSG00000135973 known_neg_ctrl sequence
CMPFTAVTLITVRWHFGDHFCRLSATLYWFFVLEGVAILLIISVDRFLIIVQRQDKLNPRRAKVIIAVSWVLSFCIAGPSLTGWT

SEQ ID NO: 45091 - protein, 85 aa, unidentified
  REGION 1..85: note = Description of Unknown:ENSG00000135973 known_neg_ctrl sequence
LVEVPARAPQCVLGYTELPADRAYVVTLVVAVFFAPFGVMLCAYMCILNTVRKNAVRVHNQSDSLDLRQLTRAGLRRLQRQQQVS

SEQ ID NO: 45092 - protein, 85 aa, unidentified
  REGION 1..85: note = Description of Unknown:ENSG00000135973 known_neg_ctrl sequence
VDLSFKTKAFTTILILFVGFSLCWLPHSVYSLLSVFSQRFYCGSSFYATSTCVLWLSYLKSVFNPIVYCWRIKKFREACIELLPQ

SEQ ID NO: 45093 - protein, 84 aa, unidentified
  REGION 1..84: note = Description of Unknown:ENSG00000135973 known_neg_ctrl sequence
LSVFSQRFYCGSSFYATSTCVLWLSYLKSVFNPIVYCWRIKKFREACIELLPQTFQILPKVPERIRRRIQPSTVYVCNENQSAV

SEQ ID NO: 45094 - protein, 85 aa, unidentified
  REGION 1..85: note = Description of Unknown:ENSG00000135973 known_neg_ctrl sequence
LPAPLRISLAIVMLLMTVVGFLGNTVVCIIVYQRPAMRSAINLLLATLAFSDIMLSLCCMPFTAVTLITVRWHFGDHFCRLSATL

SEQ ID NO: 45095 - protein, 85 aa, unidentified
  REGION 1..85: note = Description of Unknown:ENSG00000135973 known_neg_ctrl sequence
YWFFVLEGVAILLIISVDRFLIIVQRQDKLNPRRAKVIIAVSWVLSFCIAGPSLTGWTLVEVPARAPQCVLGYTELPADRAYVVT

SEQ ID NO: 45096 - protein, 85 aa, unidentified
  REGION 1..85: note = Description of Unknown:ENSG00000135973 known_neg_ctrl sequence
LVVAVFFAPFGVMLCAYMCILNTVRKNAVRVHNQSDSLDLRQLTRAGLRRLQRQQQVSVDLSFKTKAFTTILILFVGFSLCWLPH

SEQ ID NO: 45097 - protein, 85 aa, unidentified
  REGION 1..85: note = Description of Unknown:ENSG00000135973 known_neg_ctrl sequence
SVYSLLSVFSQRFYCGSSFYATSTCVLWLSYLKSVFNPIVYCWRIKKFREACIELLPQTFQILPKVPERIRRRIQPSTVYVCNEN

SEQ ID NO: 45098 - protein, 85 aa, unidentified; identical to SEQ ID NO: 14999
  REGION 1..85: note = Description of Unknown:ENSG00000099904 known_neg_ctrl sequence

SEQ ID NO: 45099 - protein, 85 aa, unidentified; identical to SEQ ID NO: 15000
  REGION 1..85: note = Description of Unknown:ENSG00000099904 known_neg_ctrl sequence

SEQ ID NO: 45100 - protein, 85 aa, unidentified; identical to SEQ ID NO: 15001
  REGION 1..85: note = Description of Unknown:ENSG00000099904 known_neg_ctrl sequence

SEQ ID NO: 45101 - protein, 85 aa, unidentified; identical to SEQ ID NO: 15002
  REGION 1..85: note = Description of Unknown:ENSG00000099904 known_neg_ctrl sequence

SEQ ID NO: 45102 - protein, 85 aa, unidentified; identical to SEQ ID NO: 15003
  REGION 1..85: note = Description of Unknown:ENSG00000099904 known_neg_ctrl sequence

SEQ ID NO: 45103 - protein, 85 aa, unidentified; identical to SEQ ID NO: 15004
  REGION 1..85: note = Description of Unknown:ENSG00000099904 known_neg_ctrl sequence

SEQ ID NO: 45104 - protein, 85 aa, unidentified
  REGION 1..85: note = Description of Unknown:ENSG00000099904 known_neg_ctrl sequence
PPRCSHCSVCDNCVEVTGKFRGGVNPFTRGCCGNVEHVLCSPLAPRYVVEPPRLPLAVSLKPPFLRPELLDRAAPLKVKLSDNGL

SEQ ID NO: 45105 - protein, 85 aa, unidentified
  REGION 1..85: note = Description of Unknown:ENSG00000099904 known_neg_ctrl sequence
KAGLGRSKSKGSLDRLDEKPLDLGPPLPPKIEAGTFSSDLQTPRPGSAESALSVQRTSPPTPAMYKFRPAFPTGPKVPFCGPGEQ

SEQ ID NO: 45106 - protein, 85 aa, unidentified
  REGION 1..85: note = Description of Unknown:ENSG00000099904 known_neg_ctrl sequence
VPGPDSLTLGDDSIRSLDFVSEPSLDLPDYGPGGLHAAYPPSPPLSASDAFSGALRSLSLKASSRRGGDHVALQPLRSEGGPPTP

SEQ ID NO: 45107 - protein, 85 aa, unidentified
  REGION 1..85: note = Description of Unknown:ENSG00000099904 known_neg_ctrl sequence
HRSIFAPHALPNRNGSLSYDSLLNPGSPGGHACPAHPAVGVAGYHSPYLHPGATGDPPRPLPRSFSPVLGPRPREPSPVRYDNLS

SEQ ID NO: 45108 - protein, 85 aa, unidentified
  REGION 1..85: note = Description of Unknown:ENSG00000099904 known_neg_ctrl sequence
RTIMASIQERKDREERERLLRSQADSLFGDSGVYDAPSSYSLQQASVLSEGPRGPALRYGSRDDLVAGPGFGGARNPALQTSLSS

SEQ ID NO: 45109 - protein, 85 aa, unidentified
  REGION 1..85: note = Description of Unknown:ENSG00000099904 known_neg_ctrl sequence
LSSSVSRAPRTSSSSLQADQASSNAPGPRPSSGSHRSPARQGLPSPPGTPHSPSYAGPKAVAFIHTDLPEPPPSLTVQRDHPQLK

SEQ ID NO: 45110 - protein, 85 aa, unidentified
  REGION 1..85: note = Description of Unknown:ENSG00000152822 known_neg_ctrl sequence
VGLLLFFFPAIFLEVSLLPRSPGRKVLLAGASSQRSVARMDGDVIIGALFSVHHQPPAEKVPERKCGEIREQYGIQRVEAMFHTL

SEQ ID NO: 45111 - protein, 85 aa, unidentified
  REGION 1..85: note = Description of Unknown:ENSG00000152822 known_neg_ctrl sequence
DKINADPVLLPNITLGSEIRDSCWHSSVALEQSIEFIRDSLISIRDEKDGINRCLPDGQSLPPGRTKKPIAGVIGPGSSSVAIQV

SEQ ID NO: 45112 - protein, 85 aa, unidentified
  REGION 1..85: note = Description of Unknown:ENSG00000152822 known_neg_ctrl sequence
QNLLQLFDIPQIAYSATSIDLSDKTLYKYFLRVVPSDTLQARAMLDIVKRYNWTYVSAVHTEGNYGESGMDAFKELAAQEGLCIA

SEQ ID NO: 45113 - protein, 85 aa, unidentified
  REGION 1..85: note = Description of Unknown:ENSG00000152822 known_neg_ctrl sequence
HSDKIYSNAGEKSFDRLLRKLRERLPKARVVVCFCEGMTVRGLLSAMRRLGVVGEFSLIGSDGWADRDEVIEGYEVEANGGITIK

SEQ ID NO: 45114 - protein, 85 aa, unidentified
  REGION 1..85: note = Description of Unknown:ENSG00000152822 known_neg_ctrl sequence
LQSPEVRSFDDYFLKLRLDTNTRNPWFPEFWQHRFQCRLPGHLLENPNFKRICTGNESLEENYVQDSKMGFVINAIYAMAHGLQN

SEQ ID NO: 45115 - protein, 85 aa, unidentified
  REGION 1..85: note = Description of Unknown:ENSG00000152822 known_neg_ctrl sequence
MHHALCPGHVGLCDAMKPIDGSKLLDFLIKSSFIGVSGEEVWFDEKGDAPGRYDIMNLQYTEANRYDYVHVGTWHEGVLNIDDYK

SEQ ID NO: 45116 - protein, 85 aa, unidentified
  REGION 1..85: note = Description of Unknown:ENSG00000152822 known_neg_ctrl sequence
IQMNKSGVVRSVCSEPCLKGQIKVIRKGEVSCCWICTACKENEYVQDEFTCKACDLGWWPNADLTGCEPIPVRYLEWSNIESIIA

SEQ ID NO: 45117 - protein, 85 aa, unidentified
  REGION 1..85: note = Description of Unknown:ENSG00000152822 known_neg_ctrl sequence
IAFSCLGILVTLFVTLIFVLYRDTPVVKSSSRELCYIILAGIFLGYVCPFTLIAKPTTTSCYLQRLLVGLSSAMCYSALVTKTNR

SEQ ID NO: 45118 - protein, 85 aa, unidentified
  REGION 1..85: note = Description of Unknown:ENSG00000152822 known_neg_ctrl sequence
IARILAGSKKKICTRKPRFMSAWAQVIIASILISVQLTLVVTLIIMEPPMPILSYPSIKEVYLICNTSNLGVVAPLGYNGLLIMS

SEQ ID NO: 45119 - protein, 85 aa, unidentified
  REGION 1..85: note = Description of Unknown:ENSG00000152822 known_neg_ctrl sequence
CTYYAFKTRNVPANFNEAKYIAFTMYTTCIIWLAFVPIYFGSNYKIITTCFAVSLSVTVALGCMFTPKMYIIIAKPERNVRSAFT

SEQ ID NO: 45120 - protein, 85 aa, unidentified
  REGION 1..85: note = Description of Unknown:ENSG00000152822 known_neg_ctrl sequence
TSDVVRMHVGDGKLPCRSNTFLNIFRRKKAGAGNANSNGKSVSWSEPGGGQVPKGQHMWHRLSVHVKTNETACNQTAVIKPLTKS

SEQ ID NO: 45121 - protein, 85 aa, unidentified
  REGION 1..85: note = Description of Unknown:ENSG00000152822 known_neg_ctrl sequence
YQGSGKSLTFSDTSTKTLYNVEEEEDAQPIRFSPPGSPSMVVHRRVPSAATTPPLPSHLTAEETPLFLAEPALPKGLPPPLQQQQ

SEQ ID NO: 45122 - protein, 85 aa, unidentified
  REGION 1..85: note = Description of Unknown:ENSG00000152822 known_neg_ctrl sequence
QPPPQQKSLMDQLQGVVSNFSTAIPDFHAVLAGPGGPGNGLRSLYPPPPPPQHLQMLPLQLSTFGEELVSPPADDDDDSERFKLL

SEQ ID NO: 45123 - protein, 85 aa, unidentified
  REGION 1..85: note = Description of Unknown:ENSG00000152822 known_neg_ctrl sequence
QEYVYEHEREGNTEEDELEEEEEDLQAASKLTPDDSPALTPPSPFRDSVASGSSVPSSPVSESVLCTPPNVSYASVILRDYKQSS

SEQ ID NO: 45124 - protein, 84 aa, unidentified
  REGION 1..84: note = Description of Unknown:ENSG00000152822 known_neg_ctrl sequence
YEHEREGNTEEDELEEEEEDLQAASKLTPDDSPALTPPSPFRDSVASGSSVPSSPVSESVLCTPPNVSYASVILRDYKQSSSTL

SEQ ID NO: 45125 - protein, 85 aa, unidentified
  REGION 1..85: note = Description of Unknown:ENSG00000152822 known_neg_ctrl sequence
LAGASSQRSVARMDGDVIIGALFSVHHQPPAEKVPERKCGEIREQYGIQRVEAMFHTLDKINADPVLLPNITLGSEIRDSCWHSS

SEQ ID NO: 45126 - protein, 85 aa, unidentified
  REGION 1..85: note = Description of Unknown:ENSG00000152822 known_neg_ctrl sequence
VALEQSIEFIRDSLISIRDEKDGINRCLPDGQSLPPGRTKKPIAGVIGPGSSSVAIQVQNLLQLFDIPQIAYSATSIDLSDKTLY

SEQ ID NO: 45127 - protein, 85 aa, unidentified
  REGION 1..85: note = Description of Unknown:ENSG00000152822 known_neg_ctrl sequence
KYFLRVVPSDTLQARAMLDIVKRYNWTYVSAVHTEGNYGESGMDAFKELAAQEGLCIAHSDKIYSNAGEKSFDRLLRKLRERLPK

SEQ ID NO: 45128 - protein, 85 aa, unidentified
  REGION 1..85: note = Description of Unknown:ENSG00000152822 known_neg_ctrl sequence
ARVVVCFCEGMTVRGLLSAMRRLGVVGEFSLIGSDGWADRDEVIEGYEVEANGGITIKLQSPEVRSFDDYFLKLRLDTNTRNPWF

SEQ ID NO: 45129 - protein, 85 aa, unidentified
  REGION 1..85: note = Description of Unknown:ENSG00000152822 known_neg_ctrl sequence
PEFWQHRFQCRLPGHLLENPNFKRICTGNESLEENYVQDSKMGFVINAIYAMAHGLQNMHHALCPGHVGLCDAMKPIDGSKLLDF

SEQ ID NO: 45130 - protein, 85 aa, unidentified
  REGION 1..85: note = Description of Unknown:ENSG00000152822 known_neg_ctrl sequence
LIKSSFIGVSGEEVWFDEKGDAPGRYDIMNLQYTEANRYDYVHVGTWHEGVLNIDDYKIQMNKSGVVRSVCSEPCLKGQIKVIRK

SEQ ID NO: 45131 - protein, 85 aa, unidentified
  REGION 1..85: note = Description of Unknown:ENSG00000152822 known_neg_ctrl sequence
GEVSCCWICTACKENEYVQDEFTCKACDLGWWPNADLTGCEPIPVRYLEWSNIESIIAIAFSCLGILVTLFVTLIFVLYRDTPVV

SEQ ID NO: 45132 - protein, 85 aa, unidentified
  REGION 1..85: note = Description of Unknown:ENSG00000152822 known_neg_ctrl sequence
KSSSRELCYIILAGIFLGYVCPFTLIAKPTTTSCYLQRLLVGLSSAMCYSALVTKTNRIARILAGSKKKICTRKPRFMSAWAQVI

SEQ ID NO: 45133 - protein, 85 aa, unidentified
  REGION 1..85: note = Description of Unknown:ENSG00000152822 known_neg_ctrl sequence
IASILISVQLTLVVTLIIMEPPMPILSYPSIKEVYLICNTSNLGVVAPLGYNGLLIMSCTYYAFKTRNVPANFNEAKYIAFTMYT

SEQ ID NO: 45134 - protein, 85 aa, unidentified
  REGION 1..85: note = Description of Unknown:ENSG00000152822 known_neg_ctrl sequence
TCIIWLAFVPIYFGSNYKIITTCFAVSLSVTVALGCMFTPKMYIIIAKPERNVRSAFTTSDVVRMHVGDGKLPCRSNTFLNIFRR

SEQ ID NO: 45135 - protein, 85 aa, unidentified
  REGION 1..85: note = Description of Unknown:ENSG00000152822 known_neg_ctrl sequence
KKAGAGNANSNGKSVSWSEPGGGQVPKGQHMWHRLSVHVKTNETACNQTAVIKPLTKSYQGSGKSLTFSDTSTKTLYNVEEEEDA

SEQ ID NO: 45136 - protein, 85 aa, unidentified
  REGION 1..85: note = Description of Unknown:ENSG00000152822 known_neg_ctrl sequence
QPIRFSPPGSPSMVVHRRVPSAATTPPLPSHLTAEETPLFLAEPALPKGLPPPLQQQQQPPPQQKSLMDQLQGVVSNFSTAIPDF

SEQ ID NO: 45137 - protein, 85 aa, unidentified
  REGION 1..85: note = Description of Unknown:ENSG00000152822 known_neg_ctrl sequence
HAVLAGPGGPGNGLRSLYPPPPPPQHLQMLPLQLSTFGEELVSPPADDDDDSERFKLLQEYVYEHEREGNTEEDELEEEEEDLQA

SEQ ID NO: 45138 - protein, 85 aa, unidentified; identical to SEQ ID NO: 14685
  REGION 1..85: note = Description of Unknown:ENSG00000007264 known_neg_ctrl sequence

SEQ ID NO: 45139 - protein, 85 aa, unidentified; identical to SEQ ID NO: 14686
  REGION 1..85: note = Description of Unknown:ENSG00000007264 known_neg_ctrl sequence

SEQ ID NO: 45140 - protein, 85 aa, unidentified
  REGION 1..85: note = Description of Unknown:ENSG00000007264 known_neg_ctrl sequence
LHRDGHLTIDEAVFFCNLMDMVEHYSKDKGAICTKLVRPKRKHGTKSAEEELARAGWLLNLQHLTLGAQIGEGEFGAVLQGEYLG

SEQ ID NO: 45141 - protein, 85 aa, unidentified; identical to SEQ ID NO: 14688
  REGION 1..85: note = Description of Unknown:ENSG00000007264 known_neg_ctrl sequence

SEQ ID NO: 45142 - protein, 85 aa, unidentified; identical to SEQ ID NO: 14689
  REGION 1..85: note = Description of Unknown:ENSG00000007264 known_neg_ctrl sequence

SEQ ID NO: 45143 - protein, 84 aa, unidentified; identical to SEQ ID NO: 14690
  REGION 1..84: note = Description of Unknown:ENSG00000007264 known_neg_ctrl sequence

SEQ ID NO: 45144 - protein, 85 aa, unidentified
  REGION 1..85: note = Description of Unknown:ENSG00000007264 known_neg_ctrl sequence
FLRAWHPPPVSARMPTRRWAPGTQCITKCEHTRPKPGELAFRKGDVVTILEACENKSWYRVKHHTSGQEGLLAAGALREREALSA

SEQ ID NO: 45145 - protein, 85 aa, unidentified
  REGION 1..85: note = Description of Unknown:ENSG00000007264 known_neg_ctrl sequence
DPKLSLMPWFHGKISGQEAVQQLQPPEDGLFLVRESARHPGDYVLCVSFGRDVIHYRVLHRDGHLTIDEAVFFCNLMDMVEHYSK

SEQ ID NO: 45146 - protein, 85 aa, unidentified
  REGION 1..85: note = Description of Unknown:ENSG00000007264 known_neg_ctrl sequence
DKGAICTKLVRPKRKHGTKSAEEELARAGWLLNLQHLTLGAQIGEGEFGAVLQGEYLGQKVAVKNIKCDVTAQAFLDETAVMTKM

SEQ ID NO: 45147 - protein, 85 aa, unidentified
  REGION 1..85: note = Description of Unknown:ENSG00000007264 known_neg_ctrl sequence
QHENLVRLLGVILHQGLYIVMEHVSKGNLVNFLRTRGRALVNTAQLLQFSLHVAEGMEYLESKKLVHRDLAARNILVSEDLVAKV

SEQ ID NO: 45148 - protein, 85 aa, unidentified
  REGION 1..85: note = Description of Unknown:ENSG00000007264 known_neg_ctrl sequence
SDFGLAKAERKGLDSSRLPVKWTAPEALKHGKFTSKSDVWSFGVLLWEVFSYGRAPYPKMSLKEVSEAVEKGYRMEPPEGCPGPV

SEQ ID NO: 45149 - protein, 85 aa, unidentified
  REGION 1..85: note = Description of Unknown:ENSG00000135298 known_neg_ctrl sequence
LLPQGKEAVEGKKCQGRQRRAGLSEVWSRKLRNESLGTWSTQGCKTVLTDASHTKCLCDRLSTFAILAQQPREIIMESSGTPSVT

SEQ ID NO: 45150 - protein, 85 aa, unidentified
  REGION 1..85: note = Description of Unknown:ENSG00000135298 known_neg_ctrl sequence
LIVGSGLSCLALITLAVVYAALWRYIRSERSIILINFCLSIISSNILILVGQTQTHNKSICTTTTAFLHFFFLASFCWVLTEAWQ

SEQ ID NO: 45151 - protein, 85 aa, unidentified
  REGION 1..85: note = Description of Unknown:ENSG00000135298 known_neg_ctrl sequence
SYMAVTGKIRTRLIRKRFLCLGWGLPALVVATSVGFTRTKGYGTDHYCWLSLEGGLLYAFVGPAAAVVLVNMVIGILVFNKLVSR

SEQ ID NO: 45152 - protein, 85 aa, unidentified
  REGION 1..85: note = Description of Unknown:ENSG00000135298 known_neg_ctrl sequence
DGILDKKLKHRAGQMSEPHSGLTLKCAKCGVVSTTALSATTASNAMASLWSSCVVLPLLALTWMSAVLAMTDKRSILFQILFAVF

SEQ ID NO: 45153 - protein, 85 aa, unidentified
  REGION 1..85: note = Description of Unknown:ENSG00000135298 known_neg_ctrl sequence
DSLQGFVIVMVHCILRREVQDAFRCRLRNCQDPINADSSSSFPNGHAQIMTDFEKDVDIACRSVLHKDIGPCRAATITGTLSRIS

SEQ ID NO: 45154 - protein, 85 aa, unidentified
  REGION 1..85: note = Description of Unknown:ENSG00000135298 known_neg_ctrl sequence
LNDDEEEKGTNPEGLSYSTLPGNVISKVIIQQPTGLHMPMSMNELSNPCLKKENSELRRTVYLCTDDNLRGADMDIVHPQERMME

SEQ ID NO: 45155 - protein, 85 aa, unidentified
  REGION 1..85: note = Description of Unknown:ENSG00000135298 known_neg_ctrl sequence
SDYIVMPRSSVNNQPSMKEESKMNIGMETLPHERLLHYKVNPEFNMNPPVMDQFNMNLEQHLAPQEHMQNLPFEPRTAVKNFMAS

SEQ ID NO: 45156 - protein, 85 aa, unidentified
  REGION 1..85: note = Description of Unknown:ENSG00000135298 known_neg_ctrl sequence
ELDDNAGLSRSETGSTISMSSLERRKSRYSDLDFEKVMHTRKRHMELFQELNQKFQTLDRFRDIPNTSSMENPAPNKNPWDTFKN

SEQ ID NO: 45157 - protein, 84 aa, unidentified
  REGION 1..84: note = Description of Unknown:ENSG00000135298 known_neg_ctrl sequence
QELNQKFQTLDRFRDIPNTSSMENPAPNKNPWDTFKNPSEYPHYTTINVLDTEAKDALELRPAEWEKCLNLPLDVQEGDFQTEV

SEQ ID NO: 45158 - protein, 85 aa, unidentified
  REGION 1..85: note = Description of Unknown:ENSG00000135298 known_neg_ctrl sequence
SRKLRNESLGTWSTQGCKTVLTDASHTKCLCDRLSTFAILAQQPREIIMESSGTPSVTLIVGSGLSCLALITLAVVYAALWRYIR

SEQ ID NO: 45159 - protein, 85 aa, unidentified
  REGION 1..85: note = Description of Unknown:ENSG00000135298 known_neg_ctrl sequence
SERSIILINFCLSIISSNILILVGQTQTHNKSICTTTTAFLHFFFLASFCWVLTEAWQSYMAVTGKIRTRLIRKRFLCLGWGLPA

SEQ ID NO: 45160 - protein, 85 aa, unidentified
  REGION 1..85: note = Description of Unknown:ENSG00000135298 known_neg_ctrl sequence
LVVATSVGFTRTKGYGTDHYCWLSLEGGLLYAFVGPAAAVVLVNMVIGILVFNKLVSRDGILDKKLKHRAGQMSEPHSGLTLKCA

SEQ ID NO: 45161 - protein, 85 aa, unidentified
  REGION 1..85: note = Description of Unknown:ENSG00000135298 known_neg_ctrl sequence
KCGVVSTTALSATTASNAMASLWSSCVVLPLLALTWMSAVLAMTDKRSILFQILFAVFDSLQGFVIVMVHCILRREVQDAFRCRL

SEQ ID NO: 45162 - protein, 85 aa, unidentified
  REGION 1..85: note = Description of Unknown:ENSG00000135298 known_neg_ctrl sequence
RNCQDPINADSSSSFPNGHAQIMTDFEKDVDIACRSVLHKDIGPCRAATITGTLSRISLNDDEEEKGTNPEGLSYSTLPGNVISK

SEQ ID NO: 45163 - protein, 85 aa, unidentified
  REGION 1..85: note = Description of Unknown:ENSG00000135298 known_neg_ctrl sequence
VIIQQPTGLHMPMSMNELSNPCLKKENSELRRTVYLCTDDNLRGADMDIVHPQERMMESDYIVMPRSSVNNQPSMKEESKMNIGM

SEQ ID NO: 45164 - protein, 85 aa, unidentified
  REGION 1..85: note = Description of Unknown:ENSG00000135298 known_neg_ctrl sequence
ETLPHERLLHYKVNPEFNMNPPVMDQFNMNLEQHLAPQEHMQNLPFEPRTAVKNFMASELDDNAGLSRSETGSTISMSSLERRKS

SEQ ID NO: 45165 - protein, 85 aa, unidentified
  REGION 1..85: note = Description of Unknown:ENSG00000135298 known_neg_ctrl sequence
RYSDLDFEKVMHTRKRHMELFQELNQKFQTLDRFRDIPNTSSMENPAPNKNPWDTFKNPSEYPHYTTINVLDTEAKDALELRPAE

SEQ ID NO: 45166 - protein, 85 aa, unidentified; identical to SEQ ID NO: 14704
  REGION 1..85: note = Description of Unknown:ENSG00000124092 known_neg_ctrl sequence

SEQ ID NO: 45167 - protein, 85 aa, unidentified; identical to SEQ ID NO: 14705
  REGION 1..85: note = Description of Unknown:ENSG00000124092 known_neg_ctrl sequence

SEQ ID NO: 45168 - protein, 85 aa, unidentified; identical to SEQ ID NO: 14706
  REGION 1..85: note = Description of Unknown:ENSG00000124092 known_neg_ctrl sequence

SEQ ID NO: 45169 - protein, 85 aa, unidentified; identical to SEQ ID NO: 14707
  REGION 1..85: note = Description of Unknown:ENSG00000124092 known_neg_ctrl sequence

SEQ ID NO: 45170 - protein, 85 aa, unidentified; identical to SEQ ID NO: 14708
  REGION 1..85: note = Description of Unknown:ENSG00000124092 known_neg_ctrl sequence

SEQ ID NO: 45171 - protein, 85 aa, unidentified; identical to SEQ ID NO: 14709
  REGION 1..85: note = Description of Unknown:ENSG00000124092 known_neg_ctrl sequence

SEQ ID NO: 45172 - protein, 85 aa, unidentified; identical to SEQ ID NO: 14710
  REGION 1..85: note = Description of Unknown:ENSG00000124092 known_neg_ctrl sequence

SEQ ID NO: 45173 - protein, 84 aa, unidentified; identical to SEQ ID NO: 14711
  REGION 1..84: note = Description of Unknown:ENSG00000124092 known_neg_ctrl sequence

SEQ ID NO: 45174 - protein, 85 aa, unidentified
  REGION 1..85: note = Description of Unknown:ENSG00000124092 known_neg_ctrl sequence
EEEKDGVCREKDHRSPSELEAERTSGAFQDSVLEEEVELVLAPSEESEKYILTLQTVHFTSEAVELQDMSLLSIQQQEGVQVVVQ

SEQ ID NO: 45175 - protein, 85 aa, unidentified
  REGION 1..85: note = Description of Unknown:ENSG00000124092 known_neg_ctrl sequence
QPGPGLLWLEEGPRQSLQQCVAISIQQELYSPQEMEVLQFHALEENVMVASEDSKLAVSLAETTGLIKLEEEQEKNQLLAERTKE

SEQ ID NO: 45176 - protein, 85 aa, unidentified
  REGION 1..85: note = Description of Unknown:ENSG00000124092 known_neg_ctrl sequence
QLFFVETMSGDERSDEIVLTVSNSNVEEQEDQPTAGQADAEKAKSTKNQRKTKGAKGTFHCDVCMFTSSRMSSFNRHMKTHTSEK

SEQ ID NO: 45177 - protein, 85 aa, unidentified
  REGION 1..85: note = Description of Unknown:ENSG00000124092 known_neg_ctrl sequence
PHLCHLCLKTFRTVTLLRNHVNTHTGTRPYKCNDCNMAFVTSGELVRHRRYKHTHEKPFKCSMCKYASVEASKLKRHVRSHTGER

SEQ ID NO: 45178 - protein, 85 aa, unidentified
  REGION 1..85: note = Description of Unknown:ENSG00000124092 known_neg_ctrl sequence
PFQCCQCSYASRDTYKLKRHMRTHSGEKPYECHICHTRFTQSGTMKIHILQKHGENVPKYQCPHCATIIARKSDLRVHMRNLHAY

SEQ ID NO: 45179 - protein, 85 aa, unidentified
  REGION 1..85: note = Description of Unknown:ENSG00000124092 known_neg_ctrl sequence
SAAELKCRYCSAVFHERYALIQHQKTHKNEKRFKCKHCSYACKQERHMTAHIRTHTGEKPFTCLSCNKCFRQKQLLNAHFRKYHD

SEQ ID NO: 45180 - protein, 85 aa, unidentified
  REGION 1..85: note = Description of Unknown:ENSG00000124092 known_neg_ctrl sequence
ANFIPTVYKCSKCGKGFSRWINLHRHSEKCGSGEAKSAASGKGRRTRKRKQTILKEATKGQKEAAKGWKEAANGDEAAAEEASTT

SEQ ID NO: 45181 - protein, 85 aa, unidentified
  REGION 1..85: note = Description of Unknown:ENSG00000170790 known_neg_ctrl sequence
SFSSLPTEIQSLLFLTFLTIYLVTLMGNCLIILVTLADPMLHSPMYFFLRNLSFLEIGFNLVIVPKMLGTLLAQDTTISFLGCAT

SEQ ID NO: 45182 - protein, 85 aa, unidentified
  REGION 1..85: note = Description of Unknown:ENSG00000170790 known_neg_ctrl sequence
QMYFFFFFGVAECFLLATMAYDRYVAICSPLHYPVIMNQRTRAKLAAASWFPGFPVATVQTTWLFSFPFCGTNKVNHFFCDSPPV

SEQ ID NO: 45183 - protein, 85 aa, unidentified
  REGION 1..85: note = Description of Unknown:ENSG00000170790 known_neg_ctrl sequence
LRLVCADTALFEIYAIVGTILVVMIPCLLILCSYTHIAAAILKIPSAKGKNKAFSTCSSHLLVVSLFYISLSLTYFRPKSNNSPE

SEQ ID NO: 45184 - protein, 84 aa, unidentified
  REGION 1..84: note = Description of Unknown:ENSG00000170790 known_neg_ctrl sequence
GKNKAFSTCSSHLLVVSLFYISLSLTYFRPKSNNSPEGKKLLSLSYTVMTPMLNPIIYSLRNNEVKNALSRTVSKALALRNCIP

SEQ ID NO: 45185 - protein, 85 aa, unidentified
  REGION 1..85: note = Description of Unknown:ENSG00000170790 known_neg_ctrl sequence
NCLIILVTLADPMLHSPMYFFLRNLSFLEIGFNLVIVPKMLGTLLAQDTTISFLGCATQMYFFFFFGVAECFLLATMAYDRYVAI

SEQ ID NO: 45186 - protein, 85 aa, unidentified
  REGION 1..85: note = Description of Unknown:ENSG00000170790 known_neg_ctrl sequence
CSPLHYPVIMNQRTRAKLAAASWFPGFPVATVQTTWLFSFPFCGTNKVNHFFCDSPPVLRLVCADTALFEIYAIVGTILVVMIPC

SEQ ID NO: 45187 - protein, 85 aa, unidentified
  REGION 1..85: note = Description of Unknown:ENSG00000170790 known_neg_ctrl sequence
LLILCSYTHIAAAILKIPSAKGKNKAFSTCSSHLLVVSLFYISLSLTYFRPKSNNSPEGKKLLSLSYTVMTPMLNPIIYSLRNNE

SEQ ID NO: 45188 - protein, 85 aa, unidentified
  REGION 1..85: note = Description of Unknown:ENSG00000111432 known_neg_ctrl sequence
QRPGPRLWLVLQVMGSCAAISSMDMERPGDGKCQPIEIPMCKDIGYNMTRMPNLMGHENQREAAIQLHEFAPLVEYGCHGHLRFF

SEQ ID NO: 45189 - protein, 85 aa, unidentified
  REGION 1..85: note = Description of Unknown:ENSG00000111432 known_neg_ctrl sequence
LCSLYAPMCTEQVSTPIPACRVMCEQARLKCSPIMEQFNFKWPDSLDCRKLPNKNDPNYLCMEAPNNGSDEPTRGSGLFPPLFRP

SEQ ID NO: 45190 - protein, 85 aa, unidentified
  REGION 1..85: note = Description of Unknown:ENSG00000111432 known_neg_ctrl sequence
QRPHSAQEHPLKDGGPGRGGCDNPGKFHHVEKSASCAPLCTPGVDVYWSREDKRFAVVWLAIWAVLCFFSSAFTVLTFLIDPARF

SEQ ID NO: 45191 - protein, 85 aa, unidentified
  REGION 1..85: note = Description of Unknown:ENSG00000111432 known_neg_ctrl sequence
RYPERPIIFLSMCYCVYSVGYLIRLFAGAESIACDRDSGQLYVIQEGLESTGCTLVFLVLYYFGMASSLWWVVLTLTWFLAAGKK

SEQ ID NO: 45192 - protein, 85 aa, unidentified
  REGION 1..85: note = Description of Unknown:ENSG00000111432 known_neg_ctrl sequence
WGHEAIEANSSYFHLAAWAIPAVKTILILVMRRVAGDELTGVCYVGSMDVNALTGFVLIPLACYLVIGTSFILSGFVALFHIRRV

SEQ ID NO: 45193 - protein, 85 aa, unidentified
  REGION 1..85: note = Description of Unknown:ENSG00000111432 known_neg_ctrl sequence
MKTGGENTDKLEKLMVRIGLFSVLYTVPATCVIACYFYERLNMDYWKILAAQHKCKMNNQTKTLDCLMAASIPAVEIFMVKIFML

SEQ ID NO: 45194 - protein, 84 aa, unidentified
  REGION 1..84: note = Description of Unknown:ENSG00000111432 known_neg_ctrl sequence
IPAVEIFMVKIFMLLVVGITSGMWIWTSKTLQSWQQVCSRRLKKKSRRKPASVITSGGIYKKAQHPQKTHHGKYEIPAQSPTCV

SEQ ID NO: 45195 - protein, 85 aa, unidentified
  REGION 1..85: note = Description of Unknown:ENSG00000111432 known_neg_ctrl sequence
PGDGKCQPIEIPMCKDIGYNMTRMPNLMGHENQREAAIQLHEFAPLVEYGCHGHLRFFLCSLYAPMCTEQVSTPIPACRVMCEQA

SEQ ID NO: 45196 - protein, 85 aa, unidentified
  REGION 1..85: note = Description of Unknown:ENSG00000111432 known_neg_ctrl sequence
RLKCSPIMEQFNFKWPDSLDCRKLPNKNDPNYLCMEAPNNGSDEPTRGSGLFPPLFRPQRPHSAQEHPLKDGGPGRGGCDNPGKF

SEQ ID NO: 45197 - protein, 85 aa, unidentified
  REGION 1..85: note = Description of Unknown:ENSG00000111432 known_neg_ctrl sequence
HHVEKSASCAPLCTPGVDVYWSREDKRFAVVWLAIWAVLCFFSSAFTVLTFLIDPARFRYPERPIIFLSMCYCVYSVGYLIRLFA

SEQ ID NO: 45198 - protein, 85 aa, unidentified
  REGION 1..85: note = Description of Unknown:ENSG00000111432 known_neg_ctrl sequence
GAESIACDRDSGQLYVIQEGLESTGCTLVFLVLYYFGMASSLWWVVLTLTWFLAAGKKWGHEAIEANSSYFHLAAWAIPAVKTIL

SEQ ID NO: 45199 - protein, 85 aa, unidentified
  REGION 1..85: note = Description of Unknown:ENSG00000111432 known_neg_ctrl sequence
ILVMRRVAGDELTGVCYVGSMDVNALTGFVLIPLACYLVIGTSFILSGFVALFHIRRVMKTGGENTDKLEKLMVRIGLFSVLYTV

SEQ ID NO: 45200 - protein, 85 aa, unidentified
  REGION 1..85: note = Description of Unknown:ENSG00000111432 known_neg_ctrl sequence
PATCVIACYFYERLNMDYWKILAAQHKCKMNNQTKTLDCLMAASIPAVEIFMVKIFMLLVVGITSGMWIWTSKTLQSWQQVCSRR

SEQ ID NO: 45201 - protein, 85 aa, unidentified
  REGION 1..85: note = Description of Unknown:ENSG00000164220 known_neg_ctrl sequence
KALIFAAAGLLLLLPTFCQSGMENDTNNLAKPTLPIKTFRGAPPNSFEEFPFSALEGWTGATITVKIKCPEESASHLHVKNATMG

SEQ ID NO: 45202 - protein, 85 aa, unidentified
  REGION 1..85: note = Description of Unknown:ENSG00000164220 known_neg_ctrl sequence
YLTSSLSTKLIPAIYLLVFVVGVPANAVTLWMLFFRTRSICTTVFYTNLAIADFLFCVTLPFKIAYHLNGNNWVFGEVLCRATTV

SEQ ID NO: 45203 - protein, 85 aa, unidentified
  REGION 1..85: note = Description of Unknown:ENSG00000164220 known_neg_ctrl sequence
IFYGNMYCSILLLACISINRYLAIVHPFTYRGLPKHTYALVTCGLVWATVFLYMLPFFILKQEYYLVQPDITTCHDVHNTCESSS

SEQ ID NO: 45204 - protein, 85 aa, unidentified
  REGION 1..85: note = Description of Unknown:ENSG00000164220 known_neg_ctrl sequence
PFQLYYFISLAFFGFLIPFVLIIYCYAAIIRTLNAYDHRWLWYVKASLLILVIFTICFAPSNIILIIHHANYYYNNTDGLYFIYL

SEQ ID NO: 45205 - protein, 84 aa, unidentified
  REGION 1..84: note = Description of Unknown:ENSG00000164220 known_neg_ctrl sequence
AYDHRWLWYVKASLLILVIFTICFAPSNIILIIHHANYYYNNTDGLYFIYLIALCLGSLNSCLDPFLYFLMSKTRNHSTAYLTK

SEQ ID NO: 45206 - protein, 85 aa, unidentified
  REGION 1..85: note = Description of Unknown:ENSG00000164220 known_neg_ctrl sequence
NLAKPTLPIKTFRGAPPNSFEEFPFSALEGWTGATITVKIKCPEESASHLHVKNATMGYLTSSLSTKLIPAIYLLVFVVGVPANA

SEQ ID NO: 45207 - protein, 85 aa, unidentified
  REGION 1..85: note = Description of Unknown:ENSG00000164220 known_neg_ctrl sequence
VTLWMLFFRTRSICTTVFYTNLAIADFLFCVTLPFKIAYHLNGNNWVFGEVLCRATTVIFYGNMYCSILLLACISINRYLAIVHP

SEQ ID NO: 45208 - protein, 85 aa, unidentified
  REGION 1..85: note = Description of Unknown:ENSG00000164220 known_neg_ctrl sequence
FTYRGLPKHTYALVTCGLVWATVFLYMLPFFILKQEYYLVQPDITTCHDVHNTCESSSPFQLYYFISLAFFGFLIPFVLIIYCYA

SEQ ID NO: 45209 - protein, 85 aa, unidentified
  REGION 1..85: note = Description of Unknown:ENSG00000164220 known_neg_ctrl sequence
AIIRTLNAYDHRWLWYVKASLLILVIFTICFAPSNIILIIHHANYYYNNTDGLYFIYLIALCLGSLNSCLDPFLYFLMSKTRNHS

SEQ ID NO: 45210 - protein, 85 aa, unidentified
  REGION 1..85: note = Description of Unknown:ENSG00000179097 known_neg_ctrl sequence
DFLNSSDQNLTSEELLNRMPSKILVSLTLSGLALMTTTINSLVIAAIIVTRKLHHPANYLICSLAVTDFLVAVLVMPFSIVYIVR

SEQ ID NO: 45211 - protein, 85 aa, unidentified
  REGION 1..85: note = Description of Unknown:ENSG00000179097 known_neg_ctrl sequence
ESWIMGQVVCDIWLSVDITCCTCSILHLSAIALDRYRAITDAVEYARKRTPKHAGIMITIVWIISVFISMPPLFWRHQGTSRDDE

SEQ ID NO: 45212 - protein, 85 aa, unidentified
  REGION 1..85: note = Description of Unknown:ENSG00000179097 known_neg_ctrl sequence
CIIKHDHIVSTIYSTFGAFYIPLALILILYYKIYRAAKTLYHKRQASRIAKEEVNGQVLLESGEKSTKSVSTSYVLEKSLSDPST

SEQ ID NO: 45213 - protein, 85 aa, unidentified
  REGION 1..85: note = Description of Unknown:ENSG00000179097 known_neg_ctrl sequence
DFDKIHSTVRSLRSEFKHEKSWRRQKISGTRERKAATTLGLILGAFVICWLPFFVKELVVNVCDKCKISEEMSNFLAWLGYLNSL

SEQ ID NO: 45214 - protein, 84 aa, unidentified
  REGION 1..84: note = Description of Unknown:ENSG00000179097 known_neg_ctrl sequence
ISGTRERKAATTLGLILGAFVICWLPFFVKELVVNVCDKCKISEEMSNFLAWLGYLNSLINPLIYTIFNEDFKKAFQKLVRCRC

SEQ ID NO: 45215 - protein, 85 aa, unidentified
  REGION 1..85: note = Description of Unknown:ENSG00000179097 known_neg_ctrl sequence
TLSGLALMTTTINSLVIAAIIVTRKLHHPANYLICSLAVTDFLVAVLVMPFSIVYIVRESWIMGQVVCDIWLSVDITCCTCSILH

SEQ ID NO: 45216 - protein, 85 aa, unidentified
  REGION 1..85: note = Description of Unknown:ENSG00000179097 known_neg_ctrl sequence
LSAIALDRYRAITDAVEYARKRTPKHAGIMITIVWIISVFISMPPLFWRHQGTSRDDECIIKHDHIVSTIYSTFGAFYIPLALIL

SEQ ID NO: 45217 - protein, 85 aa, unidentified
  REGION 1..85: note = Description of Unknown:ENSG00000179097 known_neg_ctrl sequence
ILYYKIYRAAKTLYHKRQASRIAKEEVNGQVLLESGEKSTKSVSTSYVLEKSLSDPSTDFDKIHSTVRSLRSEFKHEKSWRRQKI

SEQ ID NO: 45218 - protein, 85 aa, unidentified
  REGION 1..85: note = Description of Unknown:ENSG00000181072 known_neg_ctrl sequence
NNSTNSSNNSLALTSPYKTFEVVFIVLVAGSLSLVTIIGNILVMVSIKVNRHLQTVNNYFLFSLACADLIIGVFSMNLYTLYTVI

SEQ ID NO: 45219 - protein, 85 aa, unidentified
  REGION 1..85: note = Description of Unknown:ENSG00000181072 known_neg_ctrl sequence
GYWPLGPVVCDLWLALDYVVSNASVMNLLIISFDRYFCVTKPLTYPVKRTTKMAGMMIAAAWVLSFILWAPAILFWQFIVGVRTV

SEQ ID NO: 45220 - protein, 85 aa, unidentified
  REGION 1..85: note = Description of Unknown:ENSG00000181072 known_neg_ctrl sequence
EDGECYIQFFSNAAVTFGTAIAAFYLPVIIMTVLYWHISRASKSRIKKDKKEPVANQDPVSPSLVQGRIVKPNNNNMPSSDDGLE

SEQ ID NO: 45221 - protein, 85 aa, unidentified
  REGION 1..85: note = Description of Unknown:ENSG00000181072 known_neg_ctrl sequence
HNKIQNGKAPRDPVTENCVQGEEKESSNDSTSVSAVASNMRDDEITQDENTVSTSLGHSKDENSKQTCIRIGTKTPKSDSCTPTN

SEQ ID NO: 45222 - protein, 85 aa, unidentified
  REGION 1..85: note = Description of Unknown:ENSG00000181072 known_neg_ctrl sequence
TTVEVVGSSGQNGDEKQNIVARKIVKMTKQPAKKKPPPSREKKVTRTILAILLAFIITWAPYNVMVLINTFCAPCIPNTVWTIGY

SEQ ID NO: 45223 - protein, 84 aa, unidentified
  REGION 1..84: note = Description of Unknown:ENSG00000181072 known_neg_ctrl sequence
KKVTRTILAILLAFIITWAPYNVMVLINTFCAPCIPNTVWTIGYWLCYINSTINPACYALCNATFKKTFKHLLMCHYKNIGATR

SEQ ID NO: 45224 - protein, 85 aa, unidentified
  REGION 1..85: note = Description of Unknown:ENSG00000181072 known_neg_ctrl sequence
VAGSLSLVTIIGNILVMVSIKVNRHLQTVNNYFLFSLACADLIIGVFSMNLYTLYTVIGYWPLGPVVCDLWLALDYVVSNASVMN

SEQ ID NO: 45225 - protein, 85 aa, unidentified
  REGION 1..85: note = Description of Unknown:ENSG00000181072 known_neg_ctrl sequence
LLIISFDRYFCVTKPLTYPVKRTTKMAGMMIAAAWVLSFILWAPAILFWQFIVGVRTVEDGECYIQFFSNAAVTFGTAIAAFYLP

SEQ ID NO: 45226 - protein, 85 aa, unidentified
  REGION 1..85: note = Description of Unknown:ENSG00000181072 known_neg_ctrl sequence
VIIMTVLYWHISRASKSRIKKDKKEPVANQDPVSPSLVQGRIVKPNNNNMPSSDDGLEHNKIQNGKAPRDPVTENCVQGEEKESS

SEQ ID NO: 45227 - protein, 85 aa, unidentified
  REGION 1..85: note = Description of Unknown:ENSG00000181072 known_neg_ctrl sequence
NDSTSVSAVASNMRDDEITQDENTVSTSLGHSKDENSKQTCIRIGTKTPKSDSCTPTNTTVEVVGSSGQNGDEKQNIVARKIVKM

SEQ ID NO: 45228 - protein, 85 aa, unidentified
  REGION 1..85: note = Description of Unknown:ENSG00000181072 known_neg_ctrl sequence
TKQPAKKKPPPSREKKVTRTILAILLAFIITWAPYNVMVLINTFCAPCIPNTVWTIGYWLCYINSTINPACYALCNATFKKTFKH

SEQ ID NO: 45229 - protein, 85 aa, unidentified; identical to SEQ ID NO: 14613
  REGION 1..85: note = Description of Unknown:ENSG00000156269 known_neg_ctrl sequence

SEQ ID NO: 45230 - protein, 85 aa, unidentified; identical to SEQ ID NO: 14614
  REGION 1..85: note = Description of Unknown:ENSG00000156269 known_neg_ctrl sequence

SEQ ID NO: 45231 - protein, 84 aa, unidentified; identical to SEQ ID NO: 14615
  REGION 1..84: note = Description of Unknown:ENSG00000156269 known_neg_ctrl sequence

SEQ ID NO: 45232 - protein, 85 aa, unidentified
  REGION 1..85: note = Description of Unknown:ENSG00000156269 known_neg_ctrl sequence
KYYLYHGLSWPQLSYIAEDEDGKIVGYVLAKMEEEPDDVPHGHITSLAVKRSHRRLGLAQKLMDQASRAMIENFNAKYVSLHVRK

SEQ ID NO: 45233 - protein, 85 aa, unidentified
  REGION 1..85: note = Description of Unknown:ENSG00000156269 known_neg_ctrl sequence
SNRPALHLYSNTLNFQISEVEPKYYADGEDAYAMKRDLSQMADELRRQMDLKKGGYVVLGSRENQETQGSTLSDSEEACQQKNPA

SEQ ID NO: 45234 - protein, 85 aa, unidentified; identical to SEQ ID NO: 15013
  REGION 1..85: note = Description of Unknown:ENSG00000173567 known_neg_ctrl sequence

SEQ ID NO: 45235 - protein, 85 aa, unidentified; identical to SEQ ID NO: 15014
  REGION 1..85: note = Description of Unknown:ENSG00000173567 known_neg_ctrl sequence

SEQ ID NO: 45236 - protein, 85 aa, unidentified; identical to SEQ ID NO: 15015
  REGION 1..85: note = Description of Unknown:ENSG00000173567 known_neg_ctrl sequence

SEQ ID NO: 45237 - protein, 85 aa, unidentified; identical to SEQ ID NO: 15016
  REGION 1..85: note = Description of Unknown:ENSG00000173567 known_neg_ctrl sequence

SEQ ID NO: 45238 - protein, 85 aa, unidentified; identical to SEQ ID NO: 15017
  REGION 1..85: note = Description of Unknown:ENSG00000173567 known_neg_ctrl sequence

SEQ ID NO: 45239 - protein, 85 aa, unidentified; identical to SEQ ID NO: 15018
  REGION 1..85: note = Description of Unknown:ENSG00000173567 known_neg_ctrl sequence

SEQ ID NO: 45240 - protein, 85 aa, unidentified; identical to SEQ ID NO: 15019
  REGION 1..85: note = Description of Unknown:ENSG00000173567 known_neg_ctrl sequence

SEQ ID NO: 45241 - protein, 85 aa, unidentified; identical to SEQ ID NO: 15020
  REGION 1..85: note = Description of Unknown:ENSG00000173567 known_neg_ctrl sequence

SEQ ID NO: 45242 - protein, 85 aa, unidentified; identical to SEQ ID NO: 15021
  REGION 1..85: note = Description of Unknown:ENSG00000173567 known_neg_ctrl sequence

SEQ ID NO: 45243 - protein, 85 aa, unidentified; identical to SEQ ID NO: 15022
  REGION 1..85: note = Description of Unknown:ENSG00000173567 known_neg_ctrl sequence

SEQ ID NO: 45244 - protein, 84 aa, unidentified; identical to SEQ ID NO: 15023
  REGION 1..84: note = Description of Unknown:ENSG00000173567 known_neg_ctrl sequence

SEQ ID NO: 45245 - protein, 85 aa, unidentified
  REGION 1..85: note = Description of Unknown:ENSG00000173567 known_neg_ctrl sequence
RMAKTGLPEKGQSQAGGESGSGQLLDQENGAGESALVSVYVHLDFPDKTWPPELSRTLTLPAASASSSPRPLLTGLRLTTGEYMS

SEQ ID NO: 45246 - protein, 85 aa, unidentified
  REGION 1..85: note = Description of Unknown:ENSG00000173567 known_neg_ctrl sequence
CFEAQGFKWNLYEVVRVPLKATDVARLPYQLSISCATSPGFQLSCCIPSTNLAYTAAWSPGEGSKASSFNESGSQCFVLAVQRCP

SEQ ID NO: 45247 - protein, 85 aa, unidentified
  REGION 1..85: note = Description of Unknown:ENSG00000173567 known_neg_ctrl sequence
MADTTYACDLQSLGLAPLRVPISITIIQDGDITCPEDASVLTWNVTKAGHVAQAPCPESKRGIVRRLCGADGVWGPVHSSCTDAR

SEQ ID NO: 45248 - protein, 85 aa, unidentified
  REGION 1..85: note = Description of Unknown:ENSG00000173567 known_neg_ctrl sequence
LLALFTRTKLLQAGQGSPAEEVPQILAQLPGQAAEASSPSDLLTLLSTMKYVAKVVAEARIQLDRRALKNLLIATDKVLDMDTRS

SEQ ID NO: 45249 - protein, 85 aa, unidentified
  REGION 1..85: note = Description of Unknown:ENSG00000173567 known_neg_ctrl sequence
LWTLAQARKPWAGSTLLLAVETLACSLCPQDHPFAFSLPNVLLQSQLFGPTFPADYSISFPTRPPLQAQIPRHSLAPLVRNGTEI

SEQ ID NO: 45250 - protein, 85 aa, unidentified
  REGION 1..85: note = Description of Unknown:ENSG00000173567 known_neg_ctrl sequence
SITSLVLRKLDHLLPSNYGQGLGDSLYATPGLVLVISIMAGDRAFSQGEVIMDFGNTDGSPHCVFWDHSLFQGRGGWSKEGCQAQ

SEQ ID NO: 45251 - protein, 85 aa, unidentified
  REGION 1..85: note = Description of Unknown:ENSG00000173567 known_neg_ctrl sequence
VASASPTAQCLCQHLTAFSVLMSPHTVPEEPALALLTQVGLGASILALLVCLGVYWLVWRVVVRNKISYFRHAALLNMVFCLLAA

SEQ ID NO: 45252 - protein, 85 aa, unidentified
  REGION 1..85: note = Description of Unknown:ENSG00000173567 known_neg_ctrl sequence
DTCFLGAPFLSPGPRSPLCLAAAFLCHFLYLATFFWMLAQALVLAHQLLFVFHQLAKHRVLPLMVLLGYLCPLGLAGVTLGLYLP

SEQ ID NO: 45253 - protein, 85 aa, unidentified
  REGION 1..85: note = Description of Unknown:ENSG00000173567 known_neg_ctrl sequence
QGQYLREGECWLDGKGGALYTFVGPVLAIIGVNGLVLAMAMLKLLRPSLSEGPPAEKRQALLGVIKALLILTPIFGLTWGLGLAT

SEQ ID NO: 45254 - protein, 84 aa, unidentified
  REGION 1..84: note = Description of Unknown:ENSG00000152822 known_neg_ctrl sequence
VALGCMFTPKMYIIIAKPERNVRSAFTTSDVVRMHVGDGKLPCRSNTFLNIFRRKKAGAGNAKWRTGAQGTAYVAPPLCAREDQ

SEQ ID NO: 45255 - protein, 85 aa, unidentified
  REGION 1..85: note = Description of Unknown:ENSG00000204246 known_neg_ctrl sequence
IVQLICTVCFLAVNTFHVRSSFDFLKADDMGEINQTLVSEFLLLGLSGYPKIEIVYFALILVMYLVILIGNGVLIIASIFDSHFH

SEQ ID NO: 45256 - protein, 85 aa, unidentified
  REGION 1..85: note = Description of Unknown:ENSG00000204246 known_neg_ctrl sequence
TPMYFFLGNLSFLDICYTSSSVPSTLVSLISKKRNISFSGCAVQMFFGFAMGSTECLLLGMMAFDRYVAICNPLRYPIILSKVAY

SEQ ID NO: 45257 - protein, 85 aa, unidentified
  REGION 1..85: note = Description of Unknown:ENSG00000204246 known_neg_ctrl sequence
VLMASVSWLSGGINSAVQTLLAMRLPFCGNNIINHFACEILAVLKLACADISLNIITMVISNMAFLVLPLMVIFFSYMFILYTIL

SEQ ID NO: 45258 - protein, 85 aa, unidentified
  REGION 1..85: note = Description of Unknown:ENSG00000204246 known_neg_ctrl sequence
QMNSATGRRKAFSTCSAHLTVVIIFYGTIFFMYAKPKSQDLIGEEKLQALDKLISLFYGVVTPMLNPILYSLRNKDVKAAVKYLL

SEQ ID NO: 45259 - protein, 84 aa, unidentified
  REGION 1..84: note = Description of Unknown:ENSG00000204246 known_neg_ctrl sequence
RRKAFSTCSAHLTVVIIFYGTIFFMYAKPKSQDLIGEEKLQALDKLISLFYGVVTPMLNPILYSLRNKDVKAAVKYLLNKKPIH

SEQ ID NO: 45260 - protein, 85 aa, unidentified
  REGION 1..85: note = Description of Unknown:ENSG00000204246 known_neg_ctrl sequence
DDMGEINQTLVSEFLLLGLSGYPKIEIVYFALILVMYLVILIGNGVLIIASIFDSHFHTPMYFFLGNLSFLDICYTSSSVPSTLV

SEQ ID NO: 45261 - protein, 85 aa, unidentified
  REGION 1..85: note = Description of Unknown:ENSG00000204246 known_neg_ctrl sequence
SLISKKRNISFSGCAVQMFFGFAMGSTECLLLGMMAFDRYVAICNPLRYPIILSKVAYVLMASVSWLSGGINSAVQTLLAMRLPF

SEQ ID NO: 45262 - protein, 85 aa, unidentified
  REGION 1..85: note = Description of Unknown:ENSG00000204246 known_neg_ctrl sequence
CGNNIINHFACEILAVLKLACADISLNIITMVISNMAFLVLPLMVIFFSYMFILYTILQMNSATGRRKAFSTCSAHLTVVIIFYG

SEQ ID NO: 45263 - protein, 85 aa, unidentified; identical to SEQ ID NO: 15099
  REGION 1..85: note = Description of Unknown:ENSG00000007264 known_neg_ctrl sequence

SEQ ID NO: 45264 - protein, 85 aa, unidentified; identical to SEQ ID NO: 15100
  REGION 1..85: note = Description of Unknown:ENSG00000007264 known_neg_ctrl sequence

SEQ ID NO: 45265 - protein, 85 aa, unidentified; identical to SEQ ID NO: 15101
  REGION 1..85: note = Description of Unknown:ENSG00000007264 known_neg_ctrl sequence

SEQ ID NO: 45266 - protein, 85 aa, unidentified; identical to SEQ ID NO: 15102
  REGION 1..85: note = Description of Unknown:ENSG00000007264 known_neg_ctrl sequence

SEQ ID NO: 45267 - protein, 85 aa, unidentified; identical to SEQ ID NO: 15103
  REGION 1..85: note = Description of Unknown:ENSG00000007264 known_neg_ctrl sequence

SEQ ID NO: 45268 - protein, 85 aa, unidentified
  REGION 1..85: note = Description of Unknown:ENSG00000007264 known_neg_ctrl sequence
RKGDVVTILEACENKSWYRVKHHTSGQEGLLAAGALREREALSADPKLSLMPWFHGKISGQEAVQQLQPPEDGLFLVRESARHPG

SEQ ID NO: 45269 - protein, 85 aa, unidentified
  REGION 1..85: note = Description of Unknown:ENSG00000007264 known_neg_ctrl sequence
DYVLCVSFGRDVIHYRVLHRDGHLTIDEAVFFCNLMDMVEHYSKDKGAICTKLVRPKRKHGTKSAEEELARAGWLLNLQHLTLGA

SEQ ID NO: 45270 - protein, 85 aa, unidentified
  REGION 1..85: note = Description of Unknown:ENSG00000007264 known_neg_ctrl sequence
QIGEGEFGAVLQGEYLGQKVAVKNIKCDVTAQAFLDETAVMTKMQHENLVRLLGVILHQGLYIVMEHVSKGNLVNFLRTRGRALV

SEQ ID NO: 45271 - protein, 85 aa, unidentified
  REGION 1..85: note = Description of Unknown:ENSG00000007264 known_neg_ctrl sequence
NTAQLLQFSLHVAEGMEYLESKKLVHRDLAARNILVSEDLVAKVSDFGLAKAERKGLDSSRLPVKWTAPEALKHGKFTSKSDVWS

SEQ ID NO: 45272 - protein, 85 aa, unidentified
  REGION 1..85: note = Description of Unknown:ENSG00000007264 known_neg_ctrl sequence
FGVLLWEVFSYGRAPYPKMSLKEVSEAVEKGYRMEPPEGCPGPVHVLMSSCWEAEPARRPPFRKLAEKLARELRSAGAPASVSGQ

SEQ ID NO: 45273 - protein, 85 aa, unidentified
  REGION 1..85: note = Description of Unknown:ENSG00000204694 known_neg_ctrl sequence
EIVSTGNETITEFVLLGFYDIPELHFLFFIVFTAVYVFIIIGNMLIIVAVVSSQRLHKPMYIFLANLSFLDILYTSAVMPKMLEG

SEQ ID NO: 45274 - protein, 85 aa, unidentified
  REGION 1..85: note = Description of Unknown:ENSG00000204694 known_neg_ctrl sequence
FLQEATISVAGCLLQFFIFGSLATAECLLLAVMAYDRYLAICYPLHYPLLMGPRRYMGLVVTTWLSGFVVDGLVVALVAQLRFCG

SEQ ID NO: 45275 - protein, 85 aa, unidentified
  REGION 1..85: note = Description of Unknown:ENSG00000204694 known_neg_ctrl sequence
PNHIDQFYCDFMLFVGLACSDPRVAQVTTLILSVFCLTIPFGLILTSYARIVVAVLRVPAGASRRRAFSTCSSHLAVVTTFYGTL

SEQ ID NO: 45276 - protein, 84 aa, unidentified
  REGION 1..84: note = Description of Unknown:ENSG00000204694 known_neg_ctrl sequence
GASRRRAFSTCSSHLAVVTTFYGTLMIFYVAPSAVHSQLLSKVFSLLYTVVTPLFNPVIYTMRNKEVHQALRKILCIKQTETLD

SEQ ID NO: 45277 - protein, 85 aa, unidentified
  REGION 1..85: note = Description of Unknown:ENSG00000204694 known_neg_ctrl sequence
FFIVFTAVYVFIIIGNMLIIVAVVSSQRLHKPMYIFLANLSFLDILYTSAVMPKMLEGFLQEATISVAGCLLQFFIFGSLATAEC

SEQ ID NO: 45278 - protein, 85 aa, unidentified
  REGION 1..85: note = Description of Unknown:ENSG00000204694 known_neg_ctrl sequence
LLLAVMAYDRYLAICYPLHYPLLMGPRRYMGLVVTTWLSGFVVDGLVVALVAQLRFCGPNHIDQFYCDFMLFVGLACSDPRVAQV

SEQ ID NO: 45279 - protein, 85 aa, unidentified
  REGION 1..85: note = Description of Unknown:ENSG00000204694 known_neg_ctrl sequence
TTLILSVFCLTIPFGLILTSYARIVVAVLRVPAGASRRRAFSTCSSHLAVVTTFYGTLMIFYVAPSAVHSQLLSKVFSLLYTVVT

SEQ ID NO: 45280 - protein, 85 aa, unidentified
  REGION 1..85: note = Description of Unknown:ENSG00000156097 known_neg_ctrl sequence
ESSPIPQSSGNSSTLGRVPQTPGPSTASGVPEVGLRDVASESVALFFMLLLDLTAVAGNAAVMAVIAKTPALRKFVFVFHLCLVD

SEQ ID NO: 45281 - protein, 85 aa, unidentified
  REGION 1..85: note = Description of Unknown:ENSG00000156097 known_neg_ctrl sequence
LLAALTLMPLAMLSSSALFDHALFGEVACRLYLFLSVCFVSLAILSVSAINVERYYYVVHPMRYEVRMTLGLVASVLVGVWVKAL

SEQ ID NO: 45282 - protein, 85 aa, unidentified
  REGION 1..85: note = Description of Unknown:ENSG00000156097 known_neg_ctrl sequence
AMASVPVLGRVSWEEGAPSVPPGCSLQWSHSAYCQLFVVVFAVLYFLLPLLLILVVYCSMFRVARVAAMQHGPLPTWMETPRQRS

SEQ ID NO: 45283 - protein, 85 aa, unidentified
  REGION 1..85: note = Description of Unknown:ENSG00000156097 known_neg_ctrl sequence
ESLSSRSTMVTSSGAPQTTPHRTFGGGKAAVVLLAVGGQFLLCWLPYFSFHLYVALSAQPISTGQVESVVTWIGYFCFTSNPFFY

SEQ ID NO: 45284 - protein, 85 aa, unidentified
  REGION 1..85: note = Description of Unknown:ENSG00000156097 known_neg_ctrl sequence
GCLNRQIRGELSKQFVCFFKPAPEEELRLPSREGSIEENFLQFLQGTGCPSESWVSRPLPSPKQEPPAVDFRIPGQIAEETSEFL

SEQ ID NO: 45285 - protein, 84 aa, unidentified
  REGION 1..84: note = Description of Unknown:ENSG00000156097 known_neg_ctrl sequence
LRLPSREGSIEENFLQFLQGTGCPSESWVSRPLPSPKQEPPAVDFRIPGQIAEETSEFLEQQLTSDIIMSDSYLRPAASPRLES

SEQ ID NO: 45286 - protein, 85 aa, unidentified
  REGION 1..85: note = Description of Unknown:ENSG00000156097 known_neg_ctrl sequence
SGVPEVGLRDVASESVALFFMLLLDLTAVAGNAAVMAVIAKTPALRKFVFVFHLCLVDLLAALTLMPLAMLSSSALFDHALFGEV

SEQ ID NO: 45287 - protein, 85 aa, unidentified
  REGION 1..85: note = Description of Unknown:ENSG00000156097 known_neg_ctrl sequence
ACRLYLFLSVCFVSLAILSVSAINVERYYYVVHPMRYEVRMTLGLVASVLVGVWVKALAMASVPVLGRVSWEEGAPSVPPGCSLQ

SEQ ID NO: 45288 - protein, 85 aa, unidentified
  REGION 1..85: note = Description of Unknown:ENSG00000156097 known_neg_ctrl sequence
WSHSAYCQLFVVVFAVLYFLLPLLLILVVYCSMFRVARVAAMQHGPLPTWMETPRQRSESLSSRSTMVTSSGAPQTTPHRTFGGG

SEQ ID NO: 45289 - protein, 85 aa, unidentified
  REGION 1..85: note = Description of Unknown:ENSG00000156097 known_neg_ctrl sequence
KAAVVLLAVGGQFLLCWLPYFSFHLYVALSAQPISTGQVESVVTWIGYFCFTSNPFFYGCLNRQIRGELSKQFVCFFKPAPEEEL

SEQ ID NO: 45290 - protein, 85 aa, unidentified
  REGION 1..85: note = Description of Unknown:ENSG00000135298 known_neg_ctrl sequence
KAVRNLLIYIFSTYLLVMFGFNAAQDFWCSTLVKGVIYGSYSVSEMFPKNFTNCTWTLENPDPTKYSIYLKFSKKDLSCSNFSLL

SEQ ID NO: 45291 - protein, 85 aa, unidentified
  REGION 1..85: note = Description of Unknown:ENSG00000135298 known_neg_ctrl sequence
AYQFDHFSHEKIKDLLRKNHSIMQLCNSKNAFVFLQYDKNFIQIRRVFPTNFPGLQKKGEEDQKSFFEFLVLNKVSPSQFGCHVL

SEQ ID NO: 45292 - protein, 85 aa, unidentified
  REGION 1..85: note = Description of Unknown:ENSG00000135298 known_neg_ctrl sequence
CTWLESCLKSENGRTESCGIMYTKCTCPQHLGEWGIDDQSLILLNNVVLPLNEQTEGCLTQELQTTQVCNLTREAKRPPKEEFGM

SEQ ID NO: 45293 - protein, 85 aa, unidentified
  REGION 1..85: note = Description of Unknown:ENSG00000135298 known_neg_ctrl sequence
MGDHTIKSQRPRSVHEKRVPQEQADAAKFMAQTGESGVEEWSQWSTCSVTCGQGSQVRTRTCVSPYGTHCSGPLRESRVCNNTAL

SEQ ID NO: 45294 - protein, 85 aa, unidentified
  REGION 1..85: note = Description of Unknown:ENSG00000135298 known_neg_ctrl sequence
CPVHGVWEEWSPWSLCSFTCGRGQRTRTRSCTPPQYGGRPCEGPETHHKPCNIALCPVDGQWQEWSSWSQCSVTCSNGTQQRSRQ

SEQ ID NO: 45295 - protein, 85 aa, unidentified
  REGION 1..85: note = Description of Unknown:ENSG00000135298 known_neg_ctrl sequence
CTAAAHGGSECRGPWAESRECYNPECTANGQWNQWGHWSGCSKSCDGGWERRIRTCQGAVITGQQCEGTGEEVRRCNEQRCPAPY

SEQ ID NO: 45296 - protein, 85 aa, unidentified
  REGION 1..85: note = Description of Unknown:ENSG00000135298 known_neg_ctrl sequence
EICPEDYLMSMVWKRTPAGDLAFNQCPLNATGTTSRRCSLSLHGVAFWEQPSFARCISNEYRHLQHSIKEHLAKGQRMLAGDGMS

SEQ ID NO: 45297 - protein, 85 aa, unidentified
  REGION 1..85: note = Description of Unknown:ENSG00000135298 known_neg_ctrl sequence
QVTKTLLDLTQRKNFYAGDLLMSVEILRNVTDTFKRASYIPASDGVQNFFQIVSNLLDEENKEKWEDAQQIYPGSIELMQVIEDF

SEQ ID NO: 45298 - protein, 85 aa, unidentified
  REGION 1..85: note = Description of Unknown:ENSG00000135298 known_neg_ctrl sequence
IHIVGMGMMDFQNSYLMTGNVVASIQKLPAASVLTDINFPMKGRKGMVDWARNSEDRVVIPKSIFTPVSSKELDESSVFVLGAVL

SEQ ID NO: 45299 - protein, 85 aa, unidentified
  REGION 1..85: note = Description of Unknown:ENSG00000135298 known_neg_ctrl sequence
YKNLDLILPTLRNYTVINSKIIVVTIRPEPKTTDSFLEIELAHLANGTLNPYCVLWDDSKTNESLGTWSTQGCKTVLTDASHTKC

SEQ ID NO: 45300 - protein, 85 aa, unidentified
  REGION 1..85: note = Description of Unknown:ENSG00000135298 known_neg_ctrl sequence
LCDRLSTFAILAQQPREIIMESSGTPSVTLIVGSGLSCLALITLAVVYAALWRYIRSERSIILINFCLSIISSNILILVGQTQTH

SEQ ID NO: 45301 - protein, 85 aa, unidentified
  REGION 1..85: note = Description of Unknown:ENSG00000135298 known_neg_ctrl sequence
NKSICTTTTAFLHFFFLASFCWVLTEAWQSYMAVTGKIRTRLIRKRFLCLGWGLPALVVATSVGFTRTKGYGTDHYCWLSLEGGL

SEQ ID NO: 45302 - protein, 85 aa, unidentified
  REGION 1..85: note = Description of Unknown:ENSG00000135298 known_neg_ctrl sequence
LYAFVGPAAAVVLVNMVIGILVFNKLVSRDGILDKKLKHRAGQMSEPHSGLTLKCAKCGVVSTTALSATTASNAMASLWSSCVVL

SEQ ID NO: 45303 - protein, 85 aa, unidentified
  REGION 1..85: note = Description of Unknown:ENSG00000135298 known_neg_ctrl sequence
PLLALTWMSAVLAMTDKRSILFQILFAVFDSLQGFVIVMVHCILRREVQDAFRCRLRNCQDPINADSSSSFPNGHAQIMTDFEKD

SEQ ID NO: 45304 - protein, 85 aa, unidentified
  REGION 1..85: note = Description of Unknown:ENSG00000135298 known_neg_ctrl sequence
VDIACRSVLHKDIGPCRAATITGTLSRISLNDDEEEKGTNPEGLSYSTLPGNVISKVIIQQPTGLHMPMSMNELSNPCLKKENSE

SEQ ID NO: 45305 - protein, 85 aa, unidentified
  REGION 1..85: note = Description of Unknown:ENSG00000135298 known_neg_ctrl sequence
LRRTVYLCTDDNLRGADMDIVHPQERMMESDYIVMPRSSVNNQPSMKEESKMNIGMETLPHERLLHYKVNPEFNMNPPVMDQFNM

SEQ ID NO: 45306 - protein, 85 aa, unidentified
  REGION 1..85: note = Description of Unknown:ENSG00000135298 known_neg_ctrl sequence
NLEQHLAPQEHMQNLPFEPRTAVKNFMASELDDNAGLSRSETGSTISMSSLERRKSRYSDLDFEKVMHTRKRHMELFQELNQKFQ

SEQ ID NO: 45307 - protein, 85 aa, unidentified
  REGION 1..85: note = Description of Unknown:ENSG00000135298 known_neg_ctrl sequence
WCSTLVKGVIYGSYSVSEMFPKNFTNCTWTLENPDPTKYSIYLKFSKKDLSCSNFSLLAYQFDHFSHEKIKDLLRKNHSIMQLCN

SEQ ID NO: 45308 - protein, 85 aa, unidentified
  REGION 1..85: note = Description of Unknown:ENSG00000135298 known_neg_ctrl sequence
SKNAFVFLQYDKNFIQIRRVFPTNFPGLQKKGEEDQKSFFEFLVLNKVSPSQFGCHVLCTWLESCLKSENGRTESCGIMYTKCTC

SEQ ID NO: 45309 - protein, 85 aa, unidentified
  REGION 1..85: note = Description of Unknown:ENSG00000135298 known_neg_ctrl sequence
PQHLGEWGIDDQSLILLNNVVLPLNEQTEGCLTQELQTTQVCNLTREAKRPPKEEFGMMGDHTIKSQRPRSVHEKRVPQEQADAA

SEQ ID NO: 45310 - protein, 85 aa, unidentified
  REGION 1..85: note = Description of Unknown:ENSG00000135298 known_neg_ctrl sequence
KFMAQTGESGVEEWSQWSTCSVTCGQGSQVRTRTCVSPYGTHCSGPLRESRVCNNTALCPVHGVWEEWSPWSLCSFTCGRGQRTR

SEQ ID NO: 45311 - protein, 85 aa, unidentified
  REGION 1..85: note = Description of Unknown:ENSG00000135298 known_neg_ctrl sequence
TRSCTPPQYGGRPCEGPETHHKPCNIALCPVDGQWQEWSSWSQCSVTCSNGTQQRSRQCTAAAHGGSECRGPWAESRECYNPECT

SEQ ID NO: 45312 - protein, 85 aa, unidentified
  REGION 1..85: note = Description of Unknown:ENSG00000135298 known_neg_ctrl sequence
ANGQWNQWGHWSGCSKSCDGGWERRIRTCQGAVITGQQCEGTGEEVRRCNEQRCPAPYEICPEDYLMSMVWKRTPAGDLAFNQCP

SEQ ID NO: 45313 - protein, 85 aa, unidentified
  REGION 1..85: note = Description of Unknown:ENSG00000135298 known_neg_ctrl sequence
LNATGTTSRRCSLSLHGVAFWEQPSFARCISNEYRHLQHSIKEHLAKGQRMLAGDGMSQVTKTLLDLTQRKNFYAGDLLMSVEIL

SEQ ID NO: 45314 - protein, 85 aa, unidentified
  REGION 1..85: note = Description of Unknown:ENSG00000135298 known_neg_ctrl sequence
RNVTDTFKRASYIPASDGVQNFFQIVSNLLDEENKEKWEDAQQIYPGSIELMQVIEDFIHIVGMGMMDFQNSYLMTGNVVASIQK

SEQ ID NO: 45315 - protein, 85 aa, unidentified
  REGION 1..85: note = Description of Unknown:ENSG00000135298 known_neg_ctrl sequence
LPAASVLTDINFPMKGRKGMVDWARNSEDRVVIPKSIFTPVSSKELDESSVFVLGAVLYKNLDLILPTLRNYTVINSKIIVVTIR

SEQ ID NO: 45316 - protein, 85 aa, unidentified
  REGION 1..85: note = Description of Unknown:ENSG00000135298 known_neg_ctrl sequence
PEPKTTDSFLEIELAHLANGTLNPYCVLWDDSKTNESLGTWSTQGCKTVLTDASHTKCLCDRLSTFAILAQQPREIIMESSGTPS

SEQ ID NO: 45317 - protein, 85 aa, unidentified
  REGION 1..85: note = Description of Unknown:ENSG00000135298 known_neg_ctrl sequence
VTLIVGSGLSCLALITLAVVYAALWRYIRSERSIILINFCLSIISSNILILVGQTQTHNKSICTTTTAFLHFFFLASFCWVLTEA

SEQ ID NO: 45318 - protein, 85 aa, unidentified
  REGION 1..85: note = Description of Unknown:ENSG00000135298 known_neg_ctrl sequence
WQSYMAVTGKIRTRLIRKRFLCLGWGLPALVVATSVGFTRTKGYGTDHYCWLSLEGGLLYAFVGPAAAVVLVNMVIGILVFNKLV

SEQ ID NO: 45319 - protein, 85 aa, unidentified
  REGION 1..85: note = Description of Unknown:ENSG00000135298 known_neg_ctrl sequence
SRDGILDKKLKHRAGQMSEPHSGLTLKCAKCGVVSTTALSATTASNAMASLWSSCVVLPLLALTWMSAVLAMTDKRSILFQILFA

SEQ ID NO: 45320 - protein, 85 aa, unidentified
  REGION 1..85: note = Description of Unknown:ENSG00000135298 known_neg_ctrl sequence
VFDSLQGFVIVMVHCILRREVQDAFRCRLRNCQDPINADSSSSFPNGHAQIMTDFEKDVDIACRSVLHKDIGPCRAATITGTLSR

SEQ ID NO: 45321 - protein, 85 aa, unidentified
  REGION 1..85: note = Description of Unknown:ENSG00000135298 known_neg_ctrl sequence
ISLNDDEEEKGTNPEGLSYSTLPGNVISKVIIQQPTGLHMPMSMNELSNPCLKKENSELRRTVYLCTDDNLRGADMDIVHPQERM

SEQ ID NO: 45322 - protein, 85 aa, unidentified
  REGION 1..85: note = Description of Unknown:ENSG00000135298 known_neg_ctrl sequence
MESDYIVMPRSSVNNQPSMKEESKMNIGMETLPHERLLHYKVNPEFNMNPPVMDQFNMNLEQHLAPQEHMQNLPFEPRTAVKNFM

SEQ ID NO: 45323 - protein, 85 aa, unidentified
  REGION 1..85: note = Description of Unknown:ENSG00000135298 known_neg_ctrl sequence
ASELDDNAGLSRSETGSTISMSSLERRKSRYSDLDFEKVMHTRKRHMELFQELNQKFQTLDRFRDIPNTSSMENPAPNKNPWDTF

SEQ ID NO: 45324 - protein, 85 aa, unidentified; identical to SEQ ID NO: 15237
  REGION 1..85: note = Description of Unknown:ENSG00000099399 known_neg_ctrl sequence

SEQ ID NO: 45325 - protein, 85 aa, unidentified; identical to SEQ ID NO: 15238
  REGION 1..85: note = Description of Unknown:ENSG00000099399 known_neg_ctrl sequence

SEQ ID NO: 45326 - protein, 85 aa, unidentified; identical to SEQ ID NO: 15239
  REGION 1..85: note = Description of Unknown:ENSG00000099399 known_neg_ctrl sequence

SEQ ID NO: 45327 - protein, 84 aa, unidentified; identical to SEQ ID NO: 15240
  REGION 1..84: note = Description of Unknown:ENSG00000099399 known_neg_ctrl sequence

SEQ ID NO: 45328 - protein, 85 aa, unidentified
  REGION 1..85: note = Description of Unknown:ENSG00000099399 known_neg_ctrl sequence
QVTEAEEEEAPCCSSSVSGGAASSSPAAGIPQEPQRAPTTAAAAAAGVSSTKSKKGAKSHQGEKNASSSQASTSTKSPSEDPLTR

SEQ ID NO: 45329 - protein, 85 aa, unidentified
  REGION 1..85: note = Description of Unknown:ENSG00000099399 known_neg_ctrl sequence
KSGSLVQFLLYKYKIKKSVTKGEMLKIVGKRFREHFPEILKKASEGLSVVFGLELNKVNPNGHTYTFIDKVDLTDEESLLSSWDF

SEQ ID NO: 45330 - protein, 85 aa, unidentified
  REGION 1..85: note = Description of Unknown:ENSG00000099399 known_neg_ctrl sequence
PRRKLLMPLLGVIFLNGNSATEEEIWEFLNMLGVYDGEEHSVFGEPWKLITKDLVQEKYLEYKQVPSSDPPRFQFLWGPRAYAET

SEQ ID NO: 45331 - protein, 85 aa, unidentified; identical to SEQ ID NO: 15257
  REGION 1..85: note = Description of Unknown:ENSG00000167994 known_neg_ctrl sequence

SEQ ID NO: 45332 - protein, 85 aa, unidentified; identical to SEQ ID NO: 15258
  REGION 1..85: note = Description of Unknown:ENSG00000167994 known_neg_ctrl sequence

SEQ ID NO: 45333 - protein, 85 aa, unidentified; identical to SEQ ID NO: 15259
  REGION 1..85: note = Description of Unknown:ENSG00000167994 known_neg_ctrl sequence

SEQ ID NO: 45334 - protein, 85 aa, unidentified; identical to SEQ ID NO: 15260
  REGION 1..85: note = Description of Unknown:ENSG00000167994 known_neg_ctrl sequence

SEQ ID NO: 45335 - protein, 85 aa, unidentified
  REGION 1..85: note = Description of Unknown:ENSG00000167994 known_neg_ctrl sequence
CQGHRESPGALVETSAGEEAQGQEGPAAAQLDVLRLRSSSMEIREKGSEFLKEELHRAQKELKLKDEECERLSKVREQLEQELEE

SEQ ID NO: 45336 - protein, 85 aa, unidentified
  REGION 1..85: note = Description of Unknown:ENSG00000167994 known_neg_ctrl sequence
LTASLFEEAHKMVREANMKQAASEKQLKEARGKIDMLQAEVTALKTLVITSTPASPNRELHPQLLSPTKAGPRKGHSRHKSTSST

SEQ ID NO: 45337 - protein, 85 aa, unidentified
  REGION 1..85: note = Description of Unknown:ENSG00000167994 known_neg_ctrl sequence
LCPAVCPAAGHTLTPDREGKEVDTILFAEFQAWRESPTLDKTCPFLERVYREDVGPCLDFTMQELSVLVRAAVEDNTLTIEPVAS

SEQ ID NO: 45338 - protein, 85 aa, unidentified
  REGION 1..85: note = Description of Unknown:ENSG00000167994 known_neg_ctrl sequence
QTLPTVKVAEVDCSSTNTCALSGLTRTCRHRIRLGDSKSHYYISPSSRARITAVCNFFTYIRYIQQGLVRQDAEPMFWEIMRLRK

SEQ ID NO: 45339 - protein, 85 aa, unidentified; identical to SEQ ID NO: 15156
  REGION 1..85: note = Description of Unknown:ENSG00000070182 known_neg_ctrl sequence

SEQ ID NO: 45340 - protein, 85 aa, unidentified; identical to SEQ ID NO: 15157
  REGION 1..85: note = Description of Unknown:ENSG00000070182 known_neg_ctrl sequence

SEQ ID NO: 45341 - protein, 85 aa, unidentified; identical to SEQ ID NO: 15158
  REGION 1..85: note = Description of Unknown:ENSG00000070182 known_neg_ctrl sequence

SEQ ID NO: 45342 - protein, 85 aa, unidentified; identical to SEQ ID NO: 15159
  REGION 1..85: note = Description of Unknown:ENSG00000070182 known_neg_ctrl sequence

SEQ ID NO: 45343 - protein, 85 aa, unidentified; identical to SEQ ID NO: 15160
  REGION 1..85: note = Description of Unknown:ENSG00000070182 known_neg_ctrl sequence

SEQ ID NO: 45344 - protein, 85 aa, unidentified; identical to SEQ ID NO: 15161
  REGION 1..85: note = Description of Unknown:ENSG00000070182 known_neg_ctrl sequence

SEQ ID NO: 45345 - protein, 85 aa, unidentified; identical to SEQ ID NO: 15162
  REGION 1..85: note = Description of Unknown:ENSG00000070182 known_neg_ctrl sequence

SEQ ID NO: 45346 - protein, 85 aa, unidentified; identical to SEQ ID NO: 15163
  REGION 1..85: note = Description of Unknown:ENSG00000070182 known_neg_ctrl sequence

SEQ ID NO: 45347 - protein, 85 aa, unidentified; identical to SEQ ID NO: 15164
  REGION 1..85: note = Description of Unknown:ENSG00000070182 known_neg_ctrl sequence

SEQ ID NO: 45348 - protein, 85 aa, unidentified; identical to SEQ ID NO: 15165
  REGION 1..85: note = Description of Unknown:ENSG00000070182 known_neg_ctrl sequence

SEQ ID NO: 45349 - protein, 85 aa, unidentified; identical to SEQ ID NO: 15166
  REGION 1..85: note = Description of Unknown:ENSG00000070182 known_neg_ctrl sequence

SEQ ID NO: 45350 - protein, 85 aa, unidentified; identical to SEQ ID NO: 15167
  REGION 1..85: note = Description of Unknown:ENSG00000070182 known_neg_ctrl sequence

SEQ ID NO: 45351 - protein, 85 aa, unidentified; identical to SEQ ID NO: 15168
  REGION 1..85: note = Description of Unknown:ENSG00000070182 known_neg_ctrl sequence

SEQ ID NO: 45352 - protein, 85 aa, unidentified; identical to SEQ ID NO: 15169
  REGION 1..85: note = Description of Unknown:ENSG00000070182 known_neg_ctrl sequence

SEQ ID NO: 45353 - protein, 85 aa, unidentified; identical to SEQ ID NO: 15170
  REGION 1..85: note = Description of Unknown:ENSG00000070182 known_neg_ctrl sequence

SEQ ID NO: 45354 - protein, 85 aa, unidentified; identical to SEQ ID NO: 15171
  REGION 1..85: note = Description of Unknown:ENSG00000070182 known_neg_ctrl sequence

SEQ ID NO: 45355 - protein, 85 aa, unidentified; identical to SEQ ID NO: 15172
  REGION 1..85: note = Description of Unknown:ENSG00000070182 known_neg_ctrl sequence

SEQ ID NO: 45356 - protein, 85 aa, unidentified; identical to SEQ ID NO: 15173
  REGION 1..85: note = Description of Unknown:ENSG00000070182 known_neg_ctrl sequence

SEQ ID NO: 45357 - protein, 85 aa, unidentified; identical to SEQ ID NO: 15174
  REGION 1..85: note = Description of Unknown:ENSG00000070182 known_neg_ctrl sequence

SEQ ID NO: 45358 - protein, 85 aa, unidentified; identical to SEQ ID NO: 15175
  REGION 1..85: note = Description of Unknown:ENSG00000070182 known_neg_ctrl sequence

SEQ ID NO: 45359 - protein, 85 aa, unidentified
  REGION 1..85: note = Description of Unknown:ENSG00000070182 known_neg_ctrl sequence
LEQWISEKELVASSPEMGQDFDHVTLLRDKFRDFARETGAIGQERVDNVNAFIERLIDAGHSEAATIAEWKDGLNEMWADLLELI

SEQ ID NO: 45360 - protein, 85 aa, unidentified; identical to SEQ ID NO: 15177
  REGION 1..85: note = Description of Unknown:ENSG00000070182 known_neg_ctrl sequence

SEQ ID NO: 45361 - protein, 85 aa, unidentified; identical to SEQ ID NO: 15178
  REGION 1..85: note = Description of Unknown:ENSG00000070182 known_neg_ctrl sequence

SEQ ID NO: 45362 - protein, 85 aa, unidentified; identical to SEQ ID NO: 15179
  REGION 1..85: note = Description of Unknown:ENSG00000070182 known_neg_ctrl sequence

SEQ ID NO: 45363 - protein, 85 aa, unidentified; identical to SEQ ID NO: 15180
  REGION 1..85: note = Description of Unknown:ENSG00000070182 known_neg_ctrl sequence

SEQ ID NO: 45364 - protein, 85 aa, unidentified; identical to SEQ ID NO: 15181
  REGION 1..85: note = Description of Unknown:ENSG00000070182 known_neg_ctrl sequence

SEQ ID NO: 45365 - protein, 85 aa, unidentified; identical to SEQ ID NO: 15182
  REGION 1..85: note = Description of Unknown:ENSG00000070182 known_neg_ctrl sequence

SEQ ID NO: 45366 - protein, 84 aa, unidentified; identical to SEQ ID NO: 15183
  REGION 1..84: note = Description of Unknown:ENSG00000070182 known_neg_ctrl sequence

SEQ ID NO: 45367 - protein, 85 aa, unidentified
  REGION 1..85: note = Description of Unknown:ENSG00000070182 known_neg_ctrl sequence
ELDNDNSSARLFERSRIKALADEREVVQKKTFTKWVNSHLARVSCRITDLYKDLRDGRMLIKLLEVLSGEMLPKPTKGKMRIHCL

SEQ ID NO: 45368 - protein, 85 aa, unidentified
  REGION 1..85: note = Description of Unknown:ENSG00000070182 known_neg_ctrl sequence
ENVDKALQFLKEQRVHLENMGSHDIVDGNHRLVLGLIWTIILRFQIQDIVVQTQEGRETRSAKDALLLWCQMKTAGYPHVNVTNF

SEQ ID NO: 45369 - protein, 85 aa, unidentified
  REGION 1..85: note = Description of Unknown:ENSG00000070182 known_neg_ctrl sequence
TSSWKDGLAFNALIHKHRPDLIDFDKLKDSNARHNLEHAFNVAERQLGIIPLLDPEDVFTENPDEKSIITYVVAFYHYFSKMKVL

SEQ ID NO: 45370 - protein, 85 aa, unidentified
  REGION 1..85: note = Description of Unknown:ENSG00000070182 known_neg_ctrl sequence
AVEGKRVGKVIDHAIETEKMIEKYSGLASDLLTWIEQTITVLNSRKFANSLTGVQQQLQAFSTYRTVEKPPKFQEKGNLEVLLFT

SEQ ID NO: 45371 - protein, 85 aa, unidentified
  REGION 1..85: note = Description of Unknown:ENSG00000070182 known_neg_ctrl sequence
IQSRMRANNQKVYTPHDGKLVSDINRAWESLEEAEYRRELALRNELIRQEKLEQLARRFDRKAAMRETWLSENQRLVAQDNFGYD

SEQ ID NO: 45372 - protein, 85 aa, unidentified
  REGION 1..85: note = Description of Unknown:ENSG00000070182 known_neg_ctrl sequence
LAAVEAAKKKHEAIETDTAAYEERVRALEDLAQELEKENYHDQKRITARKDNILRLWSYLQELLQSRRQRLETTLALQKLFQDML

SEQ ID NO: 45373 - protein, 85 aa, unidentified
  REGION 1..85: note = Description of Unknown:ENSG00000070182 known_neg_ctrl sequence
HSIDWMDEIKAHLLSAEFGKHLLEVEDLLQKHKLMEADIAIQGDKVKAITAATLKFTEGKGYQPCDPQVIQDRISHLEQCFEELS

SEQ ID NO: 45374 - protein, 85 aa, unidentified
  REGION 1..85: note = Description of Unknown:ENSG00000070182 known_neg_ctrl sequence
NMAAGRKAQLEQSKRLWKFFWEMDEAESWIKEKEQIYSSLDYGKDLTSVLILQRKHKAFEDELRGLDAHLEQIFQEAHGMVARKQ

SEQ ID NO: 45375 - protein, 85 aa, unidentified
  REGION 1..85: note = Description of Unknown:ENSG00000070182 known_neg_ctrl sequence
FGHPQIEARIKEVSAQWDQLKDLAAFCKKNLQDAENFFQFQGDADDLKAWLQDAHRLLSGEDVGQDEGATRALGKKHKDFLEELE

SEQ ID NO: 45376 - protein, 85 aa, unidentified
  REGION 1..85: note = Description of Unknown:ENSG00000070182 known_neg_ctrl sequence
ESRGVMEHLEQQAQGFPEEFRDSPDVTHRLQALRELYQQVVAQADLRQQRLQEALDLYTVFGETDACELWMGEKEKWLAEMEMPD

SEQ ID NO: 45377 - protein, 85 aa, unidentified
  REGION 1..85: note = Description of Unknown:ENSG00000070182 known_neg_ctrl sequence
TLEDLEVVQHRFDILDQEMKTLMTQIDGVNLAANSLVESGHPRSREVKQYQDHLNTRWQAFQTLVSERREAVDSALRVHNYCVDC

SEQ ID NO: 45378 - protein, 85 aa, unidentified
  REGION 1..85: note = Description of Unknown:ENSG00000070182 known_neg_ctrl sequence
EETSKWITDKTKVVESTKDLGRDLAGIIAIQRKLSGLERDVAAIQARVDALERESQQLMDSHPEQKEDIGQRQKHLEELWQGLQQ

SEQ ID NO: 45379 - protein, 85 aa, unidentified
  REGION 1..85: note = Description of Unknown:ENSG00000070182 known_neg_ctrl sequence
SLQGQEDLLGEVSQLQAFLQDLDDFQAWLSITQKAVASEDMPESLPEAEQLLQQHAGIKDEIDGHQDSYQRVKESGEKVIQGQTD

SEQ ID NO: 45380 - protein, 85 aa, unidentified
  REGION 1..85: note = Description of Unknown:ENSG00000070182 known_neg_ctrl sequence
PEYLLLGQRLEGLDTGWNALGRMWESRSHTLAQCLGFQEFQKDAKQAEAILSNQEYTLAHLEPPDSLEAAEAGIRKFEDFLGSME

SEQ ID NO: 45381 - protein, 85 aa, unidentified
  REGION 1..85: note = Description of Unknown:ENSG00000070182 known_neg_ctrl sequence
NNRDKVLSPVDSGNKLVAEGNLYSDKIKEKVQLIEDRHRKNNEKAQEASVLLRDNLELQNFLQNCQELTLWINDKLLTSQDVSYD

SEQ ID NO: 45382 - protein, 85 aa, unidentified
  REGION 1..85: note = Description of Unknown:ENSG00000070182 known_neg_ctrl sequence
EARNLHNKWLKHQAFVAELASHEGWLENIDAEGKQLMDEKPQFTALVSQKLEALHRLWDELQATTKEKTQHLSAARSSDLRLQTH

SEQ ID NO: 45383 - protein, 85 aa, unidentified
  REGION 1..85: note = Description of Unknown:ENSG00000070182 known_neg_ctrl sequence
ADLNKWISAMEDQLRSDDPGKDLTSVNRMLAKLKRVEDQVNVRKEELGELFAQVPSMGEEGGDADLSIEKRFLDLLEPLGRRKKQ

SEQ ID NO: 45384 - protein, 85 aa, unidentified
  REGION 1..85: note = Description of Unknown:ENSG00000070182 known_neg_ctrl sequence
LESSRAKLQISRDLEDETLWVEERLPLAQSADYGTNLQTVQLFMKKNQTLQNEILGHTPRVEDVLQRGQQLVEAAEIDCQDLEER

SEQ ID NO: 45385 - protein, 85 aa, unidentified
  REGION 1..85: note = Description of Unknown:ENSG00000070182 known_neg_ctrl sequence
LGHLQSSWDRLREAAAGRLQRLRDANEAQQYYLDADEAEAWIGEQELYVISDEIPKDEEGAIVMLKRHLRQQRAVEDYGRNIKQL

SEQ ID NO: 45386 - protein, 85 aa, unidentified
  REGION 1..85: note = Description of Unknown:ENSG00000070182 known_neg_ctrl sequence
ASRAQGLLSAGHPEGEQIIRLQGQVDKHYAGLKDVAEERKRKLENMYHLFQLKRETDDLEQWISEKELVASSPEMGQDFDHVTLL

SEQ ID NO: 45387 - protein, 85 aa, unidentified
  REGION 1..85: note = Description of Unknown:ENSG00000070182 known_neg_ctrl sequence
RDKFRDFARETGAIGQERVDNVNAFIERLIDAGHSEAATIAEWKDGLNEMWADLLELIDTRMQLLAASYDLHRYFYTGAEILGLI

SEQ ID NO: 45388 - protein, 85 aa, unidentified
  REGION 1..85: note = Description of Unknown:ENSG00000070182 known_neg_ctrl sequence
DEKHRELPEDVGLDASTAESFHRVHTAFERELHLLGVQVQQFQDVATRLQTAYAGEKAEAIQNKEQEVSAAWQALLDACAGRRTQ

SEQ ID NO: 45389 - protein, 85 aa, unidentified
  REGION 1..85: note = Description of Unknown:ENSG00000070182 known_neg_ctrl sequence
LVDTADKFRFFSMARDLLSWMESIIRQIETQERPRDVSSVELLMKYHQGINAEIETRSKNFSACLELGESLLQRQHQASEEIREK

SEQ ID NO: 45390 - protein, 85 aa, unidentified
  REGION 1..85: note = Description of Unknown:ENSG00000070182 known_neg_ctrl sequence
LQQVMSRRKEMNEKWEARWERLRMLLEVCQFSRDASVAEAWLIAQEPYLASGDFGHTVDSVEKLIKRHEAFEKSTASWAERFAAL

SEQ ID NO: 45391 - protein, 85 aa, unidentified
  REGION 1..85: note = Description of Unknown:ENSG00000070182 known_neg_ctrl sequence
EKPTTLELKERQIAERPAEETGPQEEEGETAGEAPVSHHAATERTSPGEEEGTWPQNLQQPPPPGQHKDGQKSTGDERPTTEPLF

SEQ ID NO: 45392 - protein, 85 aa, unidentified
  REGION 1..85: note = Description of Unknown:ENSG00000070182 known_neg_ctrl sequence
KVLDTPLSEGDEPATLPAPRDHGQSVQMEGYLGRKHDLEGPNKKASNRSWNNLYCVLRNSELTFYKDAKNLALGMPYHGEEPLAL

SEQ ID NO: 45393 - protein, 85 aa, unidentified
  REGION 1..85: note = Description of Unknown:ENSG00000070182 known_neg_ctrl sequence
RHAICEIAANYKKKKHVFKLRLSNGSEWLFHGKDEEEMLSWLQGVSTAINESQSIRVKAQSLPLPSLSGPDASLGKKDKEKRFSF

SEQ ID NO: 45394 - protein, 85 aa, unidentified
  REGION 1..85: note = Description of Unknown:ENSG00000171873 known_neg_ctrl sequence
TFRDLLSVSFEGPRPDSSAGGSSAGGGGGSAGGAAPSEGPAVGGVPGGAGGGGGVVGAGSGEDNRSSAGEPGSAGAGGDVNGTAA

SEQ ID NO: 45395 - protein, 85 aa, unidentified
  REGION 1..85: note = Description of Unknown:ENSG00000171873 known_neg_ctrl sequence
VGGLVVSAQGVGVGVFLAAFILMAVAGNLLVILSVACNRHLQTVTNYFIVNLAVADLLLSATVLPFSATMEVLGFWAFGRAFCDV

SEQ ID NO: 45396 - protein, 85 aa, unidentified
  REGION 1..85: note = Description of Unknown:ENSG00000171873 known_neg_ctrl sequence
WAAVDVLCCTASILSLCTISVDRYVGVRHSLKYPAIMTERKAAAILALLWVVALVVSVGPLLGWKEPVPPDERFCGITEEAGYAV

SEQ ID NO: 45397 - protein, 85 aa, unidentified
  REGION 1..85: note = Description of Unknown:ENSG00000171873 known_neg_ctrl sequence
FSSVCSFYLPMAVIVVMYCRVYVVARSTTRSLEAGVKRERGKASEVVLRIHCRGAATGADGAHGMRSAKGHTFRSSLSVRLLKFS

SEQ ID NO: 45398 - protein, 85 aa, unidentified
  REGION 1..85: note = Description of Unknown:ENSG00000171873 known_neg_ctrl sequence
REKKAAKTLAIVVGVFVLCWFPFFFVLPLGSLFPQLKPSEGVFKVIFWLGYFNSCVNPLIYPCSSREFKRAFLRLLRCQCRRRRR

SEQ ID NO: 45399 - protein, 85 aa, unidentified
  REGION 1..85: note = Description of Unknown:ENSG00000171873 known_neg_ctrl sequence
RRPLWRVYGHHWRASTSGLRQDCAPSSGDAPPGAPLALTALPDPDPEPPGTPEMQAPVASRRKPPSAFREWRLLGPFRRPTTQLR

SEQ ID NO: 45400 - protein, 84 aa, unidentified
  REGION 1..84: note = Description of Unknown:ENSG00000171873 known_neg_ctrl sequence
KPPSAFREWRLLGPFRRPTTQLRAKVSSLSHKIRAGGAQRAEAACAQRSEVEAVSLGVPHEVAEGATCQAYELADYSNLRETDI

SEQ ID NO: 45401 - protein, 85 aa, unidentified
  REGION 1..85: note = Description of Unknown:ENSG00000171873 known_neg_ctrl sequence
GGSAGGAAPSEGPAVGGVPGGAGGGGGVVGAGSGEDNRSSAGEPGSAGAGGDVNGTAAVGGLVVSAQGVGVGVFLAAFILMAVAG

SEQ ID NO: 45402 - protein, 85 aa, unidentified
  REGION 1..85: note = Description of Unknown:ENSG00000171873 known_neg_ctrl sequence
NLLVILSVACNRHLQTVTNYFIVNLAVADLLLSATVLPFSATMEVLGFWAFGRAFCDVWAAVDVLCCTASILSLCTISVDRYVGV

SEQ ID NO: 45403 - protein, 85 aa, unidentified
  REGION 1..85: note = Description of Unknown:ENSG00000171873 known_neg_ctrl sequence
RHSLKYPAIMTERKAAAILALLWVVALVVSVGPLLGWKEPVPPDERFCGITEEAGYAVFSSVCSFYLPMAVIVVMYCRVYVVARS

SEQ ID NO: 45404 - protein, 85 aa, unidentified
  REGION 1..85: note = Description of Unknown:ENSG00000171873 known_neg_ctrl sequence
TTRSLEAGVKRERGKASEVVLRIHCRGAATGADGAHGMRSAKGHTFRSSLSVRLLKFSREKKAAKTLAIVVGVFVLCWFPFFFVL

SEQ ID NO: 45405 - protein, 85 aa, unidentified
  REGION 1..85: note = Description of Unknown:ENSG00000171873 known_neg_ctrl sequence
PLGSLFPQLKPSEGVFKVIFWLGYFNSCVNPLIYPCSSREFKRAFLRLLRCQCRRRRRRRPLWRVYGHHWRASTSGLRQDCAPSS

SEQ ID NO: 45406 - protein, 85 aa, unidentified
  REGION 1..85: note = Description of Unknown:ENSG00000171873 known_neg_ctrl sequence
GDAPPGAPLALTALPDPDPEPPGTPEMQAPVASRRKPPSAFREWRLLGPFRRPTTQLRAKVSSLSHKIRAGGAQRAEAACAQRSE

SEQ ID NO: 45407 - protein, 85 aa, unidentified; identical to SEQ ID NO: 15275
  REGION 1..85: note = Description of Unknown:ENSG00000070182 known_neg_ctrl sequence

SEQ ID NO: 45408 - protein, 84 aa, unidentified; identical to SEQ ID NO: 15276
  REGION 1..84: note = Description of Unknown:ENSG00000070182 known_neg_ctrl sequence

SEQ ID NO: 45409 - protein, 85 aa, unidentified
  REGION 1..85: note = Description of Unknown:ENSG00000126010 known_neg_ctrl sequence
ALNDCFLLNLEVDHFMHCNISSHSADLPVNDDWSHPGILYVIPAVYGVIILIGLIGNITLIKIFCTVKSMRNVPNLFISSLALGD

SEQ ID NO: 45410 - protein, 85 aa, unidentified
  REGION 1..85: note = Description of Unknown:ENSG00000126010 known_neg_ctrl sequence
LLLLITCAPVDASRYLADRWLFGRIGCKLIPFIQLTSVGVSVFTLTALSADRYKAIVRPMDIQASHALMKICLKAAFIWIISMLL

SEQ ID NO: 45411 - protein, 85 aa, unidentified
  REGION 1..85: note = Description of Unknown:ENSG00000126010 known_neg_ctrl sequence
AIPEAVFSDLHPFHEESTNQTFISCAPYPHSNELHPKIHSMASFLVFYVIPLSIISVYYYFIAKNLIQSAYNLPVEGNIHVKKQI

SEQ ID NO: 45412 - protein, 85 aa, unidentified
  REGION 1..85: note = Description of Unknown:ENSG00000126010 known_neg_ctrl sequence
ESRKRLAKTVLVFVGLFAFCWLPNHVIYLYRSYHYSEVDTSMLHFVTSICARLLAFTNSCVNPFALYLLSKSFRKQFNTQLLCCQ

SEQ ID NO: 45413 - protein, 84 aa, unidentified
  REGION 1..84: note = Description of Unknown:ENSG00000126010 known_neg_ctrl sequence
FVTSICARLLAFTNSCVNPFALYLLSKSFRKQFNTQLLCCQPGLIIRSHSTGRSTTCMTSLKSTNPSVATFSLINGNICHERYV

SEQ ID NO: 45414 - protein, 85 aa, unidentified
  REGION 1..85: note = Description of Unknown:ENSG00000126010 known_neg_ctrl sequence
PVNDDWSHPGILYVIPAVYGVIILIGLIGNITLIKIFCTVKSMRNVPNLFISSLALGDLLLLITCAPVDASRYLADRWLFGRIGC

SEQ ID NO: 45415 - protein, 85 aa, unidentified
  REGION 1..85: note = Description of Unknown:ENSG00000126010 known_neg_ctrl sequence
KLIPFIQLTSVGVSVFTLTALSADRYKAIVRPMDIQASHALMKICLKAAFIWIISMLLAIPEAVFSDLHPFHEESTNQTFISCAP

SEQ ID NO: 45416 - protein, 85 aa, unidentified
  REGION 1..85: note = Description of Unknown:ENSG00000126010 known_neg_ctrl sequence
YPHSNELHPKIHSMASFLVFYVIPLSIISVYYYFIAKNLIQSAYNLPVEGNIHVKKQIESRKRLAKTVLVFVGLFAFCWLPNHVI

SEQ ID NO: 45417 - protein, 85 aa, unidentified
  REGION 1..85: note = Description of Unknown:ENSG00000126010 known_neg_ctrl sequence
YLYRSYHYSEVDTSMLHFVTSICARLLAFTNSCVNPFALYLLSKSFRKQFNTQLLCCQPGLIIRSHSTGRSTTCMTSLKSTNPSV

SEQ ID NO: 45418 - protein, 85 aa, unidentified; identical to SEQ ID NO: 15266
  REGION 1..85: note = Description of Unknown:ENSG00000007264 known_neg_ctrl sequence

SEQ ID NO: 45419 - protein, 85 aa, unidentified; identical to SEQ ID NO: 15267
  REGION 1..85: note = Description of Unknown:ENSG00000007264 known_neg_ctrl sequence

SEQ ID NO: 45420 - protein, 85 aa, unidentified; identical to SEQ ID NO: 15268
  REGION 1..85: note = Description of Unknown:ENSG00000007264 known_neg_ctrl sequence

SEQ ID NO: 45421 - protein, 85 aa, unidentified; identical to SEQ ID NO: 15269
  REGION 1..85: note = Description of Unknown:ENSG00000007264 known_neg_ctrl sequence

SEQ ID NO: 45422 - protein, 85 aa, unidentified; identical to SEQ ID NO: 15270
  REGION 1..85: note = Description of Unknown:ENSG00000007264 known_neg_ctrl sequence

SEQ ID NO: 45423 - protein, 85 aa, unidentified
  REGION 1..85: note = Description of Unknown:ENSG00000007264 known_neg_ctrl sequence
RFLRAWHPPPVSARMPTRRWAPGTQCITKCEHTRPKPGELAFRKGDVVTILEACENKSWYRVKHHTSGQEGLLAAGALREREALS

SEQ ID NO: 45424 - protein, 85 aa, unidentified
  REGION 1..85: note = Description of Unknown:ENSG00000007264 known_neg_ctrl sequence
ADPKLSLMPWFHGKISGQEAVQQLQPPEDGLFLVRESARHPGDYVLCVSFGRDVIHYRVLHRDGHLTIDEAVFFCNLMDMVEHYS

SEQ ID NO: 45425 - protein, 85 aa, unidentified
  REGION 1..85: note = Description of Unknown:ENSG00000007264 known_neg_ctrl sequence
KDKGAICTKLVRPKRKHGTKSAEEELARAGWLLNLQHLTLGAQIGEGEFGAVLQGEYLGQKVAVKNIKCDVTAQAFLDETAVMTK

SEQ ID NO: 45426 - protein, 85 aa, unidentified
  REGION 1..85: note = Description of Unknown:ENSG00000007264 known_neg_ctrl sequence
MQHENLVRLLGVILHQGLYIVMEHVSKGNLVNFLRTRGRALVNTAQLLQFSLHVAEGMEYLESKKLVHRDLAARNILVSEDLVAK

SEQ ID NO: 45427 - protein, 85 aa, unidentified
  REGION 1..85: note = Description of Unknown:ENSG00000007264 known_neg_ctrl sequence
VSDFGLAKAERKGLDSSRLPVKWTAPEALKHGKFTSKSDVWSFGVLLWEVFSYGRAPYPKMSLKEVSEAVEKGYRMEPPEGCPGP

SEQ ID NO: 45428 - protein, 85 aa, unidentified
  REGION 1..85: note = Description of Unknown:ENSG00000179826 known_neg_ctrl sequence
DSTIPVLGTELTPINGREETPCYKQTLSFTGLTCIVSLVALTGNAVVLWLLGCRMRRNAVSIYILNLVAADFLFLSGHIICSPLR

SEQ ID NO: 45429 - protein, 85 aa, unidentified
  REGION 1..85: note = Description of Unknown:ENSG00000179826 known_neg_ctrl sequence
LINIRHPISKILSPVMTFPYFIGLSMLSAISTERCLSILWPIWYHCRRPRYLSSVMCVLLWALSLLRSILEWMFCDFLFSGANSV

SEQ ID NO: 45430 - protein, 85 aa, unidentified
  REGION 1..85: note = Description of Unknown:ENSG00000179826 known_neg_ctrl sequence
WCETSDFITIAWLVFLCVVLCGSSLVLLVRILCGSRKMPLTRLYVTILLTVLVFLLCGLPFGIQWALFSRIHLDWKVLFCHVHLV

SEQ ID NO: 45431 - protein, 84 aa, unidentified
  REGION 1..84: note = Description of Unknown:ENSG00000179826 known_neg_ctrl sequence
FSRIHLDWKVLFCHVHLVSIFLSALNSSANPIIYFFVGSFRQRQNRQNLKLVLQRALQDTPEVDEGGGWLPQETLELSGSRLEQ

SEQ ID NO: 45432 - protein, 85 aa, unidentified
  REGION 1..85: note = Description of Unknown:ENSG00000179826 known_neg_ctrl sequence
SFTGLTCIVSLVALTGNAVVLWLLGCRMRRNAVSIYILNLVAADFLFLSGHIICSPLRLINIRHPISKILSPVMTFPYFIGLSML

SEQ ID NO: 45433 - protein, 85 aa, unidentified
  REGION 1..85: note = Description of Unknown:ENSG00000179826 known_neg_ctrl sequence
SAISTERCLSILWPIWYHCRRPRYLSSVMCVLLWALSLLRSILEWMFCDFLFSGANSVWCETSDFITIAWLVFLCVVLCGSSLVL

SEQ ID NO: 45434 - protein, 85 aa, unidentified
  REGION 1..85: note = Description of Unknown:ENSG00000179826 known_neg_ctrl sequence
LVRILCGSRKMPLTRLYVTILLTVLVFLLCGLPFGIQWALFSRIHLDWKVLFCHVHLVSIFLSALNSSANPIIYFFVGSFRQRQN

SEQ ID NO: 45435 - protein, 85 aa, unidentified
  REGION 1..85: note = Description of Unknown:ENSG00000204174 known_neg_ctrl sequence
NTSHLLALLLPKSPQGENRSKPLGTPYNFSEHCQDSVDVMVFIVTSYSIETVVGVLGNLCLMCVTVRQKEKANVTNLLIANLAFS

SEQ ID NO: 45436 - protein, 85 aa, unidentified
  REGION 1..85: note = Description of Unknown:ENSG00000204174 known_neg_ctrl sequence
DFLMCLLCQPLTAVYTIMDYWIFGETLCKMSAFIQCMSVTVSILSLVLVALERHQLIINPTGWKPSISQAYLGIVLIWVIACVLS

SEQ ID NO: 45437 - protein, 85 aa, unidentified
  REGION 1..85: note = Description of Unknown:ENSG00000204174 known_neg_ctrl sequence
LPFLANSILENVFHKNHSKALEFLADKVVCTESWPLAHHRTIYTTFLLLFQYCLPLGFILVCYARIYRCLQRQGRVFHKGTYSLR

SEQ ID NO: 45438 - protein, 85 aa, unidentified
  REGION 1..85: note = Description of Unknown:ENSG00000204174 known_neg_ctrl sequence
AGHMKQVNVVLVVMVVAFAVLWLPLHVFNSLEDWHHEAIPICHGNLIFLVCHLLAMASTCVNPFIYGFLNTNFKKEIKALVLTCQ

SEQ ID NO: 45439 - protein, 84 aa, unidentified
  REGION 1..84: note = Description of Unknown:ENSG00000204174 known_neg_ctrl sequence
HEAIPICHGNLIFLVCHLLAMASTCVNPFIYGFLNTNFKKEIKALVLTCQQSAPLEESEHLPLSTVHTEVSKGSLRLSGRSNPI

SEQ ID NO: 45440 - protein, 85 aa, unidentified
  REGION 1..85: note = Description of Unknown:ENSG00000204174 known_neg_ctrl sequence
NFSEHCQDSVDVMVFIVTSYSIETVVGVLGNLCLMCVTVRQKEKANVTNLLIANLAFSDFLMCLLCQPLTAVYTIMDYWIFGETL

SEQ ID NO: 45441 - protein, 85 aa, unidentified
  REGION 1..85: note = Description of Unknown:ENSG00000204174 known_neg_ctrl sequence
CKMSAFIQCMSVTVSILSLVLVALERHQLIINPTGWKPSISQAYLGIVLIWVIACVLSLPFLANSILENVFHKNHSKALEFLADK

SEQ ID NO: 45442 - protein, 85 aa, unidentified
  REGION 1..85: note = Description of Unknown:ENSG00000204174 known_neg_ctrl sequence
VVCTESWPLAHHRTIYTTFLLLFQYCLPLGFILVCYARIYRCLQRQGRVFHKGTYSLRAGHMKQVNVVLVVMVVAFAVLWLPLHV

SEQ ID NO: 45443 - protein, 85 aa, unidentified
  REGION 1..85: note = Description of Unknown:ENSG00000204174 known_neg_ctrl sequence
FNSLEDWHHEAIPICHGNLIFLVCHLLAMASTCVNPFIYGFLNTNFKKEIKALVLTCQQSAPLEESEHLPLSTVHTEVSKGSLRL

SEQ ID NO: 45444 - protein, 85 aa, unidentified
  REGION 1..85: note = Description of Unknown:ENSG00000147246 known_neg_ctrl sequence
ATNYFLMSLAIADMLVGLLVMPLSLLAILYDYVWPLPRYLCPVWISLDVLFSTASIMHLCAISLDRCISSYPCDWTEGRRKGVRE

SEQ ID NO: 45445 - protein, 84 aa, unidentified
  REGION 1..84: note = Description of Unknown:ENSG00000147246 known_neg_ctrl sequence
RRKGVREQHDVRAQRPKFRSYWVLRSFLHTADDYGDYVLPDHLRSAPTSFDVTARPHRGTAWTKSGFPEVLQEEYGRGRELCKP

SEQ ID NO: 45446 - protein, 85 aa, unidentified
  REGION 1..85: note = Description of Unknown:ENSG00000147246 known_neg_ctrl sequence
ILYDYVWPLPRYLCPVWISLDVLFSTASIMHLCAISLDRCISSYPCDWTEGRRKGVREQHDVRAQRPKFRSYWVLRSFLHTADDY

SEQ ID NO: 45447 - protein, 84 aa, unidentified
  REGION 1..84: note = Description of Unknown:ENSG00000148680 known_neg_ctrl sequence
ARPFICGTSCSCIPLWVERTFLWLGYANSLINPFIYAFFNRDLRTTYRSLLQCQYRNINRKLSAAGMHEALKLAERPERPEFVL

SEQ ID NO: 45448 - protein, 85 aa, unidentified; identical to SEQ ID NO: 15113
  REGION 1..85: note = Description of Unknown:ENSG00000143627 known_neg_ctrl sequence

SEQ ID NO: 45449 - protein, 85 aa, unidentified; identical to SEQ ID NO: 15114
  REGION 1..85: note = Description of Unknown:ENSG00000143627 known_neg_ctrl sequence

SEQ ID NO: 45450 - protein, 85 aa, unidentified; identical to SEQ ID NO: 15115
  REGION 1..85: note = Description of Unknown:ENSG00000143627 known_neg_ctrl sequence

SEQ ID NO: 45451 - protein, 85 aa, unidentified; identical to SEQ ID NO: 15116
  REGION 1..85: note = Description of Unknown:ENSG00000143627 known_neg_ctrl sequence

SEQ ID NO: 45452 - protein, 85 aa, unidentified; identical to SEQ ID NO: 15117
  REGION 1..85: note = Description of Unknown:ENSG00000143627 known_neg_ctrl sequence

SEQ ID NO: 45453 - protein, 85 aa, unidentified; identical to SEQ ID NO: 15118
  REGION 1..85: note = Description of Unknown:ENSG00000143627 known_neg_ctrl sequence

SEQ ID NO: 45454 - protein, 85 aa, unidentified
  REGION 1..85: note = Description of Unknown:ENSG00000143627 known_neg_ctrl sequence
QLPAAMADTFLEHLCLLDIDSEPVAARSTSIIATIGPASRSVERLKEMIKAGMNIARLNFSHGSHEYHAESIANVREAVESFAGS

SEQ ID NO: 45455 - protein, 85 aa, unidentified
  REGION 1..85: note = Description of Unknown:ENSG00000143627 known_neg_ctrl sequence
PLSYRPVAIALDTKGPEIRTGILQGGPESEVELVKGSQVLVTVDPAFRTRGNANTVWVDYPNIVRVVPVGGRIYIDDGLISLVVQ

SEQ ID NO: 45456 - protein, 85 aa, unidentified
  REGION 1..85: note = Description of Unknown:ENSG00000143627 known_neg_ctrl sequence
KIGPEGLVTQVENGGVLGSRKGVNLPGAQVDLPGLSEQDVRDLRFGVEHGVDIVFASFVRKASDVAAVRAALGPEGHGIKIISKI

SEQ ID NO: 45457 - protein, 85 aa, unidentified
  REGION 1..85: note = Description of Unknown:ENSG00000143627 known_neg_ctrl sequence
ENHEGVKRFDEILEVSDGIMVARGDLGIEIPAEKVFLAQKMMIGRCNLAGKPVVCATQMLESMITKPRPTRAETSDVANAVLDGA

SEQ ID NO: 45458 - protein, 85 aa, unidentified
  REGION 1..85: note = Description of Unknown:ENSG00000143627 known_neg_ctrl sequence
DCIMLSGETAKGNFPVEAVKMQHAIAREAEAAVYHRQLFEELRRAAPLSRDPTEVTAIGAVEAAFKCCAAAIIVLTTTGRSAQLL

SEQ ID NO: 45459 - protein, 85 aa, unidentified
  REGION 1..85: note = Description of Unknown:ENSG00000143627 known_neg_ctrl sequence
SRYRPRAAVIAVTRSAQAARQVHLCRGVFPLLYREPPEAIWADDVDRRVQFGIESGKLRGFLRVGDLVIVVTGWRPGSGYTNIMR

SEQ ID NO: 45460 - protein, 85 aa, unidentified
  REGION 1..85: note = Description of Unknown:ENSG00000111432 known_neg_ctrl sequence
PAHRDPDVQGHRLQHDSYAQPDGPREPARGSHPVARVRAAGGVRLPRPPPLLPVLAVRADVHRAGLYPHPRLPGHVRAGPAQVLP

SEQ ID NO: 45461 - protein, 85 aa, unidentified
  REGION 1..85: note = Description of Unknown:ENSG00000111432 known_neg_ctrl sequence
DYGAVQLQVARLPGLPETPQQERPQLPVHGGAQQRLGRAHPGLGPVPAAVPAAAAPQRAGAPAEGRGPRARRLRQPGQVPPRGEE

SEQ ID NO: 45462 - protein, 85 aa, unidentified
  REGION 1..85: note = Description of Unknown:ENSG00000111432 known_neg_ctrl sequence
RVVRAALHARRGRVLEPRGQALRSGLAGHLGGAVLLLQRLHRAHLPHRPGPLPLPRAPHHLPLHVLLRLLRGLPHPPLRRRREHR

SEQ ID NO: 45463 - protein, 85 aa, unidentified
  REGION 1..85: note = Description of Unknown:ENSG00000111432 known_neg_ctrl sequence
LRPGQRPALCHPGGTGEHRLHAGLPGPLLLRHGQLAVVGGPHAHLVPGRRQEVGPRGHRSQQQLLPPGSLGHPGGEDHPDPGHAQ

SEQ ID NO: 45464 - protein, 85 aa, unidentified
  REGION 1..85: note = Description of Unknown:ENSG00000111432 known_neg_ctrl sequence
GGGGRAHRGLLRGQHGRQRAHRLRAHSPGLLPGHRHVLHPLGLRGPVPHPEGDEDGRREHGQAGEAHGAYRALLCAVHRAGHLCD

SEQ ID NO: 45465 - protein, 84 aa, unidentified
  REGION 1..84: note = Description of Unknown:ENSG00000111432 known_neg_ctrl sequence
LLPGHRHVLHPLGLRGPVPHPEGDEDGRREHGQAGEAHGAYRALLCAVHRAGHLCDRLLLLRTPQHGLLEDPGGAAQVQNEQPD

SEQ ID NO: 45466 - protein, 85 aa, unidentified
  REGION 1..85: note = Description of Unknown:ENSG00000111432 known_neg_ctrl sequence
ARGSHPVARVRAAGGVRLPRPPPLLPVLAVRADVHRAGLYPHPRLPGHVRAGPAQVLPDYGAVQLQVARLPGLPETPQQERPQLP

SEQ ID NO: 45467 - protein, 85 aa, unidentified
  REGION 1..85: note = Description of Unknown:ENSG00000111432 known_neg_ctrl sequence
VHGGAQQRLGRAHPGLGPVPAAVPAAAAPQRAGAPAEGRGPRARRLRQPGQVPPRGEERVVRAALHARRGRVLEPRGQALRSGLA

SEQ ID NO: 45468 - protein, 85 aa, unidentified
  REGION 1..85: note = Description of Unknown:ENSG00000111432 known_neg_ctrl sequence
GHLGGAVLLLQRLHRAHLPHRPGPLPLPRAPHHLPLHVLLRLLRGLPHPPLRRRREHRLRPGQRPALCHPGGTGEHRLHAGLPGP

SEQ ID NO: 45469 - protein, 85 aa, unidentified
  REGION 1..85: note = Description of Unknown:ENSG00000111432 known_neg_ctrl sequence
LLLRHGQLAVVGGPHAHLVPGRRQEVGPRGHRSQQQLLPPGSLGHPGGEDHPDPGHAQGGGGRAHRGLLRGQHGRQRAHRLRAHS

SEQ ID NO: 45470 - protein, 85 aa, unidentified
  REGION 1..85: note = Description of Unknown:ENSG00000111432 known_neg_ctrl sequence
PGLLPGHRHVLHPLGLRGPVPHPEGDEDGRREHGQAGEAHGAYRALLCAVHRAGHLCDRLLLLRTPQHGLLEDPGGAAQVQNEQP

SEQ ID NO: 45471 - protein, 84 aa, unidentified
  REGION 1..84: note = Description of Unknown:ENSG00000121853 known_neg_ctrl sequence
RSGLLTVMVWVSSIFFFLPVFCLTVLYSLIGRKLWRRRRGDAVVGASLRDQNHKQTVKMLGGSQRALRLSLAGPILSLCLLPSL

SEQ ID NO: 45472 - protein, 85 aa, unidentified
  REGION 1..85: note = Description of Unknown:ENSG00000121853 known_neg_ctrl sequence
RPTEFAVRSGLLTVMVWVSSIFFFLPVFCLTVLYSLIGRKLWRRRRGDAVVGASLRDQNHKQTVKMLGGSQRALRLSLAGPILSL

SEQ ID NO: 45473 - protein, 85 aa, unidentified; identical to SEQ ID NO: 15081
  REGION 1..85: note = Description of Unknown:ENSG00000124092 known_neg_ctrl sequence

SEQ ID NO: 45474 - protein, 85 aa, unidentified; identical to SEQ ID NO: 15082
  REGION 1..85: note = Description of Unknown:ENSG00000124092 known_neg_ctrl sequence

SEQ ID NO: 45475 - protein, 85 aa, unidentified; identical to SEQ ID NO: 15083
  REGION 1..85: note = Description of Unknown:ENSG00000124092 known_neg_ctrl sequence

SEQ ID NO: 45476 - protein, 85 aa, unidentified; identical to SEQ ID NO: 15084
  REGION 1..85: note = Description of Unknown:ENSG00000124092 known_neg_ctrl sequence

SEQ ID NO: 45477 - protein, 85 aa, unidentified; identical to SEQ ID NO: 15085
  REGION 1..85: note = Description of Unknown:ENSG00000124092 known_neg_ctrl sequence

SEQ ID NO: 45478 - protein, 84 aa, unidentified; identical to SEQ ID NO: 15086
  REGION 1..84: note = Description of Unknown:ENSG00000124092 known_neg_ctrl sequence

SEQ ID NO: 45479 - protein, 85 aa, unidentified
  REGION 1..85: note = Description of Unknown:ENSG00000124092 known_neg_ctrl sequence
GQADAEKAKSTKNQRKTKGAKGTFHCDVCMFTSSRMSSFNRHMKTHTSEKPHLCHLCLKTFRTVTLLRNHVNTHTGTRPYKCNDC

SEQ ID NO: 45480 - protein, 85 aa, unidentified
  REGION 1..85: note = Description of Unknown:ENSG00000124092 known_neg_ctrl sequence
NMAFVTSGELVRHRRYKHTHEKPFKCSMCKYASVEASKLKRHVRSHTGERPFQCCQCSYASRDTYKLKRHMRTHSGEKPYECHIC

SEQ ID NO: 45481 - protein, 85 aa, unidentified
  REGION 1..85: note = Description of Unknown:ENSG00000124092 known_neg_ctrl sequence
HTRFTQSGTMKIHILQKHGENVPKYQCPHCATIIARKSDLRVHMRNLHAYSAAELKCRYCSAVFHERYALIQHQKTHKNEKRFKC

SEQ ID NO: 45482 - protein, 85 aa, unidentified
  REGION 1..85: note = Description of Unknown:ENSG00000124092 known_neg_ctrl sequence
KHCSYACKQERHMTAHIRTHTGEKPFTCLSCNKCFRQKQLLNAHFRKYHDANFIPTVYKCSKCGKGFSRWINLHRHSEKCGSGEA

SEQ ID NO: 45483 - protein, 85 aa, unidentified
  REGION 1..85: note = Description of Unknown:ENSG00000124092 known_neg_ctrl sequence
KSAASGKGRRTRKRKQTILKEATKGQKEAAKGWKEAANGDGVISAHRNLCLLGSSDSHASVSGAGITDARHHAWLIVLLFLVEMG

SEQ ID NO: 45484 - protein, 85 aa, unidentified; identical to SEQ ID NO: 15079
  REGION 1..85: note = Description of Unknown:ENSG00000124092 known_neg_ctrl sequence

SEQ ID NO: 45485 - protein, 84 aa, unidentified; identical to SEQ ID NO: 15080
  REGION 1..84: note = Description of Unknown:ENSG00000124092 known_neg_ctrl sequence

SEQ ID NO: 45486 - protein, 85 aa, unidentified; identical to SEQ ID NO: 15347
  REGION 1..85: note = Description of Unknown:ENSG00000167994 known_neg_ctrl sequence

SEQ ID NO: 45487 - protein, 85 aa, unidentified; identical to SEQ ID NO: 15348
  REGION 1..85: note = Description of Unknown:ENSG00000167994 known_neg_ctrl sequence

SEQ ID NO: 45488 - protein, 85 aa, unidentified; identical to SEQ ID NO: 15349
  REGION 1..85: note = Description of Unknown:ENSG00000167994 known_neg_ctrl sequence

SEQ ID NO: 45489 - protein, 85 aa, unidentified
  REGION 1..85: note = Description of Unknown:ENSG00000167994 known_neg_ctrl sequence
SSMEIREKGSEFLKEELHRAQKELKLKDEECERLSKVREQLEQELEELTASLFEEAHKMVREANMKQAASEKQLKEARGKIDMLQ

SEQ ID NO: 45490 - protein, 85 aa, unidentified
  REGION 1..85: note = Description of Unknown:ENSG00000167994 known_neg_ctrl sequence
AEVTALKTLVITSTPASPNRELHPQLLSPTKAGPRKGHSRHKSTSSTLCPAVCPAAGHTLTPDREGKEPGLAPLLSLLLCVVPSK

SEQ ID NO: 45491 - protein, 85 aa, unidentified
  REGION 1..85: note = Description of Unknown:ENSG00000167994 known_neg_ctrl sequence
AVHLTYEPAWPLPPGEPPAPASTPSPSFSRQVDTILFAEFQAWRESPTLDKTCPFLERVYREDVGPCLDFTMQELSVLVRAAVED

SEQ ID NO: 45492 - protein, 85 aa, unidentified
  REGION 1..85: note = Description of Unknown:ENSG00000167994 known_neg_ctrl sequence
NTLTIEPVASQTLPTVKVAEVDCSSTNTCALSGLTRTCRHRIRLGDSKSHYYISPSSRARITAVCNFFTYIRYIQQGLVRQDAEP

SEQ ID NO: 45493 - protein, 84 aa, unidentified
  REGION 1..84: note = Description of Unknown:ENSG00000152822 known_neg_ctrl sequence
VTVALGCMFTPKMYIIIAKPERNVRSAFTTSDVVRMHVGDGKLPCRSNTFLNIFRRKKAGAGNAKKRQPEFSPTSQCPSAHVQL

SEQ ID NO: 45494 - protein, 85 aa, unidentified; identical to SEQ ID NO: 15264
  REGION 1..85: note = Description of Unknown:ENSG00000124092 known_neg_ctrl sequence

SEQ ID NO: 45495 - protein, 84 aa, unidentified; identical to SEQ ID NO: 15265
  REGION 1..84: note = Description of Unknown:ENSG00000124092 known_neg_ctrl sequence

SEQ ID NO: 45496 - protein, 85 aa, unidentified; identical to SEQ ID NO: 15306
  REGION 1..85: note = Description of Unknown:ENSG00000007264 known_neg_ctrl sequence

SEQ ID NO: 45497 - protein, 85 aa, unidentified
  REGION 1..85: note = Description of Unknown:ENSG00000007264 known_neg_ctrl sequence
SDFGLAKAERKGLDSSRLPVKWTAPEALKHGFTSKSDVWSFGVLLWEVFSYGRAPYPKMSLKEVSEAVEKGYRMEPPEGCPGPVH

SEQ ID NO: 45498 - protein, 85 aa, unidentified; identical to SEQ ID NO: 15376
  REGION 1..85: note = Description of Unknown:ENSG00000070182 known_neg_ctrl sequence

SEQ ID NO: 45499 - protein, 85 aa, unidentified; identical to SEQ ID NO: 15377
  REGION 1..85: note = Description of Unknown:ENSG00000070182 known_neg_ctrl sequence

SEQ ID NO: 45500 - protein, 85 aa, unidentified; identical to SEQ ID NO: 15378
  REGION 1..85: note = Description of Unknown:ENSG00000070182 known_neg_ctrl sequence

SEQ ID NO: 45501 - protein, 85 aa, unidentified; identical to SEQ ID NO: 15379
  REGION 1..85: note = Description of Unknown:ENSG00000070182 known_neg_ctrl sequence

SEQ ID NO: 45502 - protein, 85 aa, unidentified; identical to SEQ ID NO: 15380
  REGION 1..85: note = Description of Unknown:ENSG00000070182 known_neg_ctrl sequence

SEQ ID NO: 45503 - protein, 85 aa, unidentified; identical to SEQ ID NO: 15381
  REGION 1..85: note = Description of Unknown:ENSG00000070182 known_neg_ctrl sequence

SEQ ID NO: 45504 - protein, 85 aa, unidentified; identical to SEQ ID NO: 15382
  REGION 1..85: note = Description of Unknown:ENSG00000070182 known_neg_ctrl sequence

SEQ ID NO: 45505 - protein, 85 aa, unidentified; identical to SEQ ID NO: 15383
  REGION 1..85: note = Description of Unknown:ENSG00000070182 known_neg_ctrl sequence

SEQ ID NO: 45506 - protein, 85 aa, unidentified; identical to SEQ ID NO: 15384
  REGION 1..85: note = Description of Unknown:ENSG00000070182 known_neg_ctrl sequence

SEQ ID NO: 45507 - protein, 85 aa, unidentified; identical to SEQ ID NO: 15385
  REGION 1..85: note = Description of Unknown:ENSG00000070182 known_neg_ctrl sequence

SEQ ID NO: 45508 - protein, 85 aa, unidentified
  REGION 1..85: note = Description of Unknown:ENSG00000070182 known_neg_ctrl sequence
LEGPNKKASNSKGEEGEERRETEEEDEEEEETESVAVEMQQHASHVSWNNLYCVLRNSELTFYKDAKNLALGMPYHGEEPLALRH

SEQ ID NO: 45509 - protein, 85 aa, unidentified; identical to SEQ ID NO: 15387
  REGION 1..85: note = Description of Unknown:ENSG00000070182 known_neg_ctrl sequence

SEQ ID NO: 45510 - protein, 85 aa, unidentified
  REGION 1..85: note = Description of Unknown:ENSG00000070182 known_neg_ctrl sequence
TKEKTQHLSAARSSDLRLQTHADLNKWISAMEDQLRSDDPGKDLTSVNRMLAKLKRVEDQVNVRKEELGELFAQVPSMGEEGGDA

SEQ ID NO: 45511 - protein, 85 aa, unidentified
  REGION 1..85: note = Description of Unknown:ENSG00000070182 known_neg_ctrl sequence
DLSIEKRFLDLLEPLGRRKKQLESSRAKLQISRDLEDETLWVEERLPLAQSADYGTNLQTVQLFMKKNQTLQNEILGHTPRVEDV

SEQ ID NO: 45512 - protein, 85 aa, unidentified
  REGION 1..85: note = Description of Unknown:ENSG00000070182 known_neg_ctrl sequence
LQRGQQLVEAAEIDCQDLEERLGHLQSSWDRLREAAAGRLQRLRDANEAQQYYLDADEAEAWIGEQELYVISDEIPKDEEGAIVM

SEQ ID NO: 45513 - protein, 85 aa, unidentified
  REGION 1..85: note = Description of Unknown:ENSG00000070182 known_neg_ctrl sequence
LKRHLRQQRAVEDYGRNIKQLASRAQGLLSAGHPEGEQIIRLQGQVDKHYAGLKDVAEERKRKLENMYHLFQLKRETDDLEQWIS

SEQ ID NO: 45514 - protein, 85 aa, unidentified
  REGION 1..85: note = Description of Unknown:ENSG00000070182 known_neg_ctrl sequence
EKELVASSPEMGQDFDHVTLLRDKFRDFARETGAIGQERVDNVNAFIERLIDAGHSEAATIAEWKDGLNEMWADLLELIDTRMQL

SEQ ID NO: 45515 - protein, 85 aa, unidentified
  REGION 1..85: note = Description of Unknown:ENSG00000070182 known_neg_ctrl sequence
LAASYDLHRYFYTGAEILGLIDEKHRELPEDVGLDASTAESFHRVHTAFERELHLLGVQVQQFQDVATRLQTAYAGEKAEAIQNK

SEQ ID NO: 45516 - protein, 85 aa, unidentified
  REGION 1..85: note = Description of Unknown:ENSG00000070182 known_neg_ctrl sequence
EQEVSAAWQALLDACAGRRTQLVDTADKFRFFSMARDLLSWMESIIRQIETQERPRDVSSVELLMKYHQGINAEIETRSKNFSAC

SEQ ID NO: 45517 - protein, 85 aa, unidentified
  REGION 1..85: note = Description of Unknown:ENSG00000070182 known_neg_ctrl sequence
LELGESLLQRQHQASEEIREKLQQVMSRRKEMNEKWEARWERLRMLLEVCQFSRDASVAEAWLIAQEPYLASGDFGHTVDSVEKL

SEQ ID NO: 45518 - protein, 85 aa, unidentified
  REGION 1..85: note = Description of Unknown:ENSG00000070182 known_neg_ctrl sequence
IKRHEAFEKSTASWAERFAALEKPTTLELKERQIAERPAEETGPQEEEGETAGEAPVSHHAATERTSPGEEEGTWPQNLQQPPPP

SEQ ID NO: 45519 - protein, 85 aa, unidentified
  REGION 1..85: note = Description of Unknown:ENSG00000070182 known_neg_ctrl sequence
GQHKDGQKSTGDERPTTEPLFKVLDTPLSEGDEPATLPAPRDHGQSVQMEGYLGRKHDLEGPNKKASNSKGEEGEERRETEEEDE

SEQ ID NO: 45520 - protein, 85 aa, unidentified
  REGION 1..85: note = Description of Unknown:ENSG00000070182 known_neg_ctrl sequence
EEEETESVAVEMQQHASHVSWNNLYCVLRNSELTFYKDAKNLALGMPYHGEEPLALRHAICEIAANYKKKKHVFKLRLSNGSEWL

SEQ ID NO: 45521 - protein, 85 aa, unidentified; identical to SEQ ID NO: 15299
  REGION 1..85: note = Description of Unknown:ENSG00000124092 known_neg_ctrl sequence

SEQ ID NO: 45522 - protein, 85 aa, unidentified; identical to SEQ ID NO: 15300
  REGION 1..85: note = Description of Unknown:ENSG00000124092 known_neg_ctrl sequence

SEQ ID NO: 45523 - protein, 85 aa, unidentified; identical to SEQ ID NO: 15301
  REGION 1..85: note = Description of Unknown:ENSG00000124092 known_neg_ctrl sequence

SEQ ID NO: 45524 - protein, 85 aa, unidentified; identical to SEQ ID NO: 15112
  REGION 1..85: note = Description of Unknown:ENSG00000124092 known_neg_ctrl sequence

SEQ ID NO: 45525 - protein, 85 aa, unidentified
  REGION 1..85: note = Description of Unknown:ENSG00000124092 known_neg_ctrl sequence
LKTFRTVTLLRNHVNTHTGTRPYKCNDCNMAFVTSGELVRHRRYKHTHEKPFKCSMCKYASVEASKLKRHVRSHTGERPFQCCQC

SEQ ID NO: 45526 - protein, 85 aa, unidentified
  REGION 1..85: note = Description of Unknown:ENSG00000124092 known_neg_ctrl sequence
SYASRDTYKLKRHMRTHSGEKPYECHICHTRFTQSGTMKIHILQKHGENVPKYQCPHCATIIARKSDLRVHMRNLHAYSAAELKC

SEQ ID NO: 45527 - protein, 85 aa, unidentified
  REGION 1..85: note = Description of Unknown:ENSG00000124092 known_neg_ctrl sequence
RYCSAVFHERYALIQHQKTHKNEKRFKCKHCSYACKQERHMTAHIRTHTGEKPFTCLSCNKCFRQKQLLNAHFRKYHDANFIPTV

SEQ ID NO: 45528 - protein, 85 aa, unidentified
  REGION 1..85: note = Description of Unknown:ENSG00000124092 known_neg_ctrl sequence
YKCSKCGKGFSRWINLHRHSEKCGSGEAKSAASGKGRRTRKRKQTILKEATKGQKEAAKGWKEAANGDGVISAHRNLCLLGSSDS

SEQ ID NO: 45529 - protein, 84 aa, unidentified
  REGION 1..84: note = Description of Unknown:ENSG00000054277 known_neg_ctrl sequence
NLLVLVLYYKFQRLRTPTHLLLVNISLSDLLVSLFGVTFTFVSCLRNGWVWDTVGCVWDGFSGSLFASLCGRSSDNSSDQDFKI

SEQ ID NO: 45530 - protein, 85 aa, unidentified; identical to SEQ ID NO: 15336
  REGION 1..85: note = Description of Unknown:ENSG00000160654 known_neg_ctrl sequence

SEQ ID NO: 45531 - protein, 85 aa, unidentified; identical to SEQ ID NO: 15337
  REGION 1..85: note = Description of Unknown:ENSG00000160654 known_neg_ctrl sequence

SEQ ID NO: 45532 - protein, 84 aa, unidentified; identical to SEQ ID NO: 15338
  REGION 1..84: note = Description of Unknown:ENSG00000160654 known_neg_ctrl sequence

SEQ ID NO: 45533 - protein, 85 aa, unidentified
  REGION 1..85: note = Description of Unknown:ENSG00000160654 known_neg_ctrl sequence
HLVKVYDYQEDGSVLLTCDAEAKNITWFKDGKMIGFLTEDKKKWNLGSNAKDPRGMYQCKGSQNKSKPLQVYYRMCQNCIELNAA

SEQ ID NO: 45534 - protein, 85 aa, unidentified; identical to SEQ ID NO: 15271
  REGION 1..85: note = Description of Unknown:ENSG00000124092 known_neg_ctrl sequence

SEQ ID NO: 45535 - protein, 84 aa, unidentified; identical to SEQ ID NO: 15272
  REGION 1..84: note = Description of Unknown:ENSG00000124092 known_neg_ctrl sequence

SEQ ID NO: 45536 - protein, 85 aa, unidentified
  REGION 1..85: note = Description of Unknown:ENSG00000124092 known_neg_ctrl sequence
PHLCHLCLKTFRTVTLLRNHVNTHTGTRPYKCNDCNMAFVTSGELVRHRRYKHTHEKPFKCSMCKYASVEERHMTAHIRTHTGEK

SEQ ID NO: 45537 - protein, 85 aa, unidentified
  REGION 1..85: note = Description of Unknown:ENSG00000124092 known_neg_ctrl sequence
PFTCLSCNKCFRQKQLLNAHFRKYHDANFIPTVYKCSKCGKGFSRWILWVGNSEVAELGGPGSGPLLRLQSGCPPGLHHPKAGLG

SEQ ID NO: 45538 - protein, 8 aa, unidentified
  REGION 1..8: note = Description of Unknown:ENSG00000156269 known_neg_ctrl sequence
QMGKMLML

SEQ ID NO: 45539 - protein, 85 aa, unidentified
  REGION 1..85: note = Description of Unknown:ENSG00000164220 known_neg_ctrl sequence
ENDTNNLAKPTLPIKTFRGAPPNSFEEFPFSALEGWTGATITVKIKCPEESASHLHVKNATMGYLTSSLSTKLIPAIYLLVFVVG

SEQ ID NO: 45540 - protein, 85 aa, unidentified
  REGION 1..85: note = Description of Unknown:ENSG00000164220 known_neg_ctrl sequence
VPANAVTLWMLFFRTRSICTTVFYTNLAIADFLFCVTLPFKIAYHLNGNNWVFGEVLCRATTVIFYGNMYCSILLLACISINRYL

SEQ ID NO: 45541 - protein, 85 aa, unidentified
  REGION 1..85: note = Description of Unknown:ENSG00000164220 known_neg_ctrl sequence
AIVHPFTYRGLPKHTYALVTCGLVWATVFLYMLPFFILKQEYYLVQPDITTCHDVHNTCESSSPFQLYYFISLAFFGFLIPFVLI

SEQ ID NO: 45542 - protein, 85 aa, unidentified
  REGION 1..85: note = Description of Unknown:ENSG00000164220 known_neg_ctrl sequence
IYCYAAIIRTLNAYDHRWLWYVKASLLILVIFTICFAPSNIILIIHHANYYYNNTDGLYFIYLIALCLGSLNSCLDPFLYFLMSK

SEQ ID NO: 45543 - protein, 85 aa, unidentified
  REGION 1..85: note = Description of Unknown:ENSG00000164220 known_neg_ctrl sequence
FPFSALEGWTGATITVKIKCPEESASHLHVKNATMGYLTSSLSTKLIPAIYLLVFVVGVPANAVTLWMLFFRTRSICTTVFYTNL

SEQ ID NO: 45544 - protein, 85 aa, unidentified
  REGION 1..85: note = Description of Unknown:ENSG00000164220 known_neg_ctrl sequence
AIADFLFCVTLPFKIAYHLNGNNWVFGEVLCRATTVIFYGNMYCSILLLACISINRYLAIVHPFTYRGLPKHTYALVTCGLVWAT

SEQ ID NO: 45545 - protein, 85 aa, unidentified
  REGION 1..85: note = Description of Unknown:ENSG00000164220 known_neg_ctrl sequence
VFLYMLPFFILKQEYYLVQPDITTCHDVHNTCESSSPFQLYYFISLAFFGFLIPFVLIIYCYAAIIRTLNAYDHRWLWYVKASLL

SEQ ID NO: 45546 - protein, 85 aa, unidentified; identical to SEQ ID NO: 15355
  REGION 1..85: note = Description of Unknown:ENSG00000007264 known_neg_ctrl sequence

SEQ ID NO: 45547 - protein, 85 aa, unidentified; identical to SEQ ID NO: 15356
  REGION 1..85: note = Description of Unknown:ENSG00000007264 known_neg_ctrl sequence

SEQ ID NO: 45548 - protein, 85 aa, unidentified; identical to SEQ ID NO: 15357
  REGION 1..85: note = Description of Unknown:ENSG00000007264 known_neg_ctrl sequence

SEQ ID NO: 45549 - protein, 85 aa, unidentified; identical to SEQ ID NO: 15358
  REGION 1..85: note = Description of Unknown:ENSG00000007264 known_neg_ctrl sequence

SEQ ID NO: 45550 - protein, 85 aa, unidentified
  REGION 1..85: note = Description of Unknown:ENSG00000007264 known_neg_ctrl sequence
ESARHPGDYVLCVSFGRDVIHYRVLHRDGHLTIDEAVFFCNLMDMVERPPGNGTGCWGSPPWGWAHGCPTILQHYSKDKGAICTK

SEQ ID NO: 45551 - protein, 85 aa, unidentified
  REGION 1..85: note = Description of Unknown:ENSG00000007264 known_neg_ctrl sequence
LVRPKRKHGTKSAEEELARAGWLLNLQHLTLGAQIGEGEFGAVLQGEYLGQKVAVKNIKCDVTAQAFLDETAVMTKMQHENLVRL

SEQ ID NO: 45552 - protein, 85 aa, unidentified
  REGION 1..85: note = Description of Unknown:ENSG00000255398 known_neg_ctrl sequence
NRHHLQDHFLEIDKKNCCVFRDDFIAKVLPPVLGLEFIFGLLGNGLALWIFCFHLKSWKSSRIFLFNLAVADFLLIICLPFVMDY

SEQ ID NO: 45553 - protein, 85 aa, unidentified
  REGION 1..85: note = Description of Unknown:ENSG00000255398 known_neg_ctrl sequence
YVRRSDWKFGDIPCRLVLFMFAMNRQGSIIFLTVVAVDRYFRVVHPHHALNKISNWTAAIISCLLWGITVGLTVHLLKKKLLIQN

SEQ ID NO: 45554 - protein, 85 aa, unidentified
  REGION 1..85: note = Description of Unknown:ENSG00000255398 known_neg_ctrl sequence
GTANVCISFSICHTFRWHEAMFLLEFFLPLGIILFCSARIIWSLRQRQMDRHAKIKRAITFIMVVAIVFVICFLPSVVVRIHIFW

SEQ ID NO: 45555 - protein, 85 aa, unidentified
  REGION 1..85: note = Description of Unknown:ENSG00000255398 known_neg_ctrl sequence
LLHTSGTQNCEVYRSVDLAFFITLSFTYMNSMLDPVVYYFSSPSFPNFFSTLINRCLQRKITGEPDNNRSTSVELTGDPNKTRGA

SEQ ID NO: 45556 - protein, 84 aa, unidentified
  REGION 1..84: note = Description of Unknown:ENSG00000255398 known_neg_ctrl sequence
FFSTLINRCLQRKITGEPDNNRSTSVELTGDPNKTRGAPEALIANSGEPWSPSYLGPTSNNHSKKGHCHQEPASLEKQLGCCIE

SEQ ID NO: 45557 - protein, 85 aa, unidentified
  REGION 1..85: note = Description of Unknown:ENSG00000255398 known_neg_ctrl sequence
VLPPVLGLEFIFGLLGNGLALWIFCFHLKSWKSSRIFLFNLAVADFLLIICLPFVMDYYVRRSDWKFGDIPCRLVLFMFAMNRQG

SEQ ID NO: 45558 - protein, 85 aa, unidentified
  REGION 1..85: note = Description of Unknown:ENSG00000255398 known_neg_ctrl sequence
SIIFLTVVAVDRYFRVVHPHHALNKISNWTAAIISCLLWGITVGLTVHLLKKKLLIQNGTANVCISFSICHTFRWHEAMFLLEFF

SEQ ID NO: 45559 - protein, 85 aa, unidentified
  REGION 1..85: note = Description of Unknown:ENSG00000255398 known_neg_ctrl sequence
LPLGIILFCSARIIWSLRQRQMDRHAKIKRAITFIMVVAIVFVICFLPSVVVRIHIFWLLHTSGTQNCEVYRSVDLAFFITLSFT

SEQ ID NO: 45560 - protein, 85 aa, unidentified
  REGION 1..85: note = Description of Unknown:ENSG00000255398 known_neg_ctrl sequence
YMNSMLDPVVYYFSSPSFPNFFSTLINRCLQRKITGEPDNNRSTSVELTGDPNKTRGAPEALIANSGEPWSPSYLGPTSNNHSKK

SEQ ID NO: 45561 - protein, 84 aa, unidentified; identical to SEQ ID NO: 15130
  REGION 1..84: note = Description of Unknown:ENSG00000124092 known_neg_ctrl sequence

SEQ ID NO: 45562 - protein, 85 aa, unidentified
  REGION 1..85: note = Description of Unknown:ENSG00000124092 known_neg_ctrl sequence
PHLCHLCLKTFRTVTLLRNHVNTHTGTRPYKCNDCNMAFVTSGELVRHRRYKHTHEKPFKCSMCKYASVEVKPFLDLKLHGILVE

SEQ ID NO: 45563 - protein, 85 aa, unidentified; identical to SEQ ID NO: 15127
  REGION 1..85: note = Description of Unknown:ENSG00000099904 known_neg_ctrl sequence

SEQ ID NO: 45564 - protein, 84 aa, unidentified; identical to SEQ ID NO: 15128
  REGION 1..84: note = Description of Unknown:ENSG00000099904 known_neg_ctrl sequence

SEQ ID NO: 45565 - protein, 85 aa, unidentified
  REGION 1..85: note = Description of Unknown:ENSG00000124092 known_neg_ctrl sequence
KHCSYACKQERHMTAHIRTHTGEKPFTCLSCNKCFRQKQLLNAHFRKYHDANFIPTVYKCSKCGKGFSRWILWVGNSEVAELGGP

SEQ ID NO: 45566 - protein, 84 aa, unidentified
  REGION 1..84: note = Description of Unknown:ENSG00000054277 known_neg_ctrl sequence
GWVWDTVGCVWDGFSGSLFGIVSIATLTVLAYERYIRVVHARVINFSWAWRAITYIWLYSLAWAGAPLLGWNSFVVWKIFRQFK

SEQ ID NO: 45567 - protein, 85 aa, unidentified; identical to SEQ ID NO: 15124
  REGION 1..85: note = Description of Unknown:ENSG00000143627 known_neg_ctrl sequence

SEQ ID NO: 45568 - protein, 85 aa, unidentified; identical to SEQ ID NO: 15125
  REGION 1..85: note = Description of Unknown:ENSG00000143627 known_neg_ctrl sequence

SEQ ID NO: 45569 - protein, 85 aa, unidentified
  REGION 1..85: note = Description of Unknown:ENSG00000143627 known_neg_ctrl sequence
TIGPASRSVERLKEMIKAGMNIARLNFSHGSHEYHAESIANVREAVESFAGSPLSYRPVAIALDTKGPEIRTGILQGGPESEVEL

SEQ ID NO: 45570 - protein, 85 aa, unidentified; identical to SEQ ID NO: 15108
  REGION 1..85: note = Description of Unknown:ENSG00000124092 known_neg_ctrl sequence

SEQ ID NO: 45571 - protein, 85 aa, unidentified; identical to SEQ ID NO: 15109
  REGION 1..85: note = Description of Unknown:ENSG00000124092 known_neg_ctrl sequence

SEQ ID NO: 45572 - protein, 85 aa, unidentified; identical to SEQ ID NO: 15110
  REGION 1..85: note = Description of Unknown:ENSG00000124092 known_neg_ctrl sequence

SEQ ID NO: 45573 - protein, 85 aa, unidentified
  REGION 1..85: note = Description of Unknown:ENSG00000124092 known_neg_ctrl sequence
PFQCCQCSYASRDTYKLKRHMRTHSGVHMRNLHAYSAAELKCRYCSAVFHERYALIQHQKTHKNEKRFKCKHCSYACKQERHMTA

SEQ ID NO: 45574 - protein, 85 aa, unidentified; identical to SEQ ID NO: 15090
  REGION 1..85: note = Description of Unknown:ENSG00000124092 known_neg_ctrl sequence

SEQ ID NO: 45575 - protein, 52 aa, unidentified; identical to SEQ ID NO: 15432
  REGION 1..52: note = Description of Unknown:ENSG00000007264 known_neg_ctrl sequence

SEQ ID NO: 45576 - protein, 29 aa, unidentified
  REGION 1..29: note = Description of Unknown:ENSG00000007264 known_neg_ctrl sequence
ARNLAPNLHPPHPPAFPPWPGSQDLRAGY

SEQ ID NO: 45577 - protein, 85 aa, unidentified; identical to SEQ ID NO: 15434
  REGION 1..85: note = Description of Unknown:ENSG00000007264 known_neg_ctrl sequence

SEQ ID NO: 45578 - protein, 25 aa, unidentified
  REGION 1..25: note = Description of Unknown:ENSG00000007264 known_neg_ctrl sequence
GAGLMAVPPSCSITARTRALSAPSW

SEQ ID NO: 45579 - protein, 4 aa, unidentified
  REGION 1..4: note = Description of Unknown:ENSG00000007264 known_neg_ctrl sequence
TCSI

SEQ ID NO: 45580 - protein, 84 aa, unidentified; identical to SEQ ID NO: 15228
  REGION 1..84: note = Description of Unknown:ENSG00000124092 known_neg_ctrl sequence

SEQ ID NO: 45581 - protein, 84 aa, unidentified; identical to SEQ ID NO: 15277
  REGION 1..84: note = Description of Unknown:ENSG00000124092 known_neg_ctrl sequence

SEQ ID NO: 45582 - protein, 85 aa, unidentified; identical to SEQ ID NO: 15132
  REGION 1..85: note = Description of Unknown:ENSG00000173567 known_neg_ctrl sequence

SEQ ID NO: 45583 - protein, 85 aa, unidentified; identical to SEQ ID NO: 15133
  REGION 1..85: note = Description of Unknown:ENSG00000173567 known_neg_ctrl sequence

SEQ ID NO: 45584 - protein, 85 aa, unidentified
  REGION 1..85: note = Description of Unknown:ENSG00000173567 known_neg_ctrl sequence
LNSQLQMPGDTLSLTLHLSQEATNLSWFLRHPGSPSPILLQPGTQVSVTSSHGQAALSVSNMSHHWAGEYMSCFEAQGFKWNLYE

SEQ ID NO: 45585 - protein, 85 aa, unidentified; identical to SEQ ID NO: 15135
  REGION 1..85: note = Description of Unknown:ENSG00000173567 known_neg_ctrl sequence

SEQ ID NO: 45586 - protein, 85 aa, unidentified; identical to SEQ ID NO: 15136
  REGION 1..85: note = Description of Unknown:ENSG00000173567 known_neg_ctrl sequence

SEQ ID NO: 45587 - protein, 85 aa, unidentified; identical to SEQ ID NO: 15137
  REGION 1..85: note = Description of Unknown:ENSG00000173567 known_neg_ctrl sequence

SEQ ID NO: 45588 - protein, 85 aa, unidentified; identical to SEQ ID NO: 15138
  REGION 1..85: note = Description of Unknown:ENSG00000173567 known_neg_ctrl sequence

SEQ ID NO: 45589 - protein, 85 aa, unidentified
  REGION 1..85: note = Description of Unknown:ENSG00000173567 known_neg_ctrl sequence
LPSNYGQGLGDSLYATPGLVLVISIMAGDRAFSQGEVIMDFGNTDGSPHCVFWDHSLFQGRGGWSKEGCQAQVASASPTAQCLCQ

SEQ ID NO: 45590 - protein, 85 aa, unidentified; identical to SEQ ID NO: 15140
  REGION 1..85: note = Description of Unknown:ENSG00000173567 known_neg_ctrl sequence

SEQ ID NO: 45591 - protein, 85 aa, unidentified; identical to SEQ ID NO: 15141
  REGION 1..85: note = Description of Unknown:ENSG00000173567 known_neg_ctrl sequence

SEQ ID NO: 45592 - protein, 85 aa, unidentified; identical to SEQ ID NO: 15142
  REGION 1..85: note = Description of Unknown:ENSG00000173567 known_neg_ctrl sequence

SEQ ID NO: 45593 - protein, 84 aa, unidentified; identical to SEQ ID NO: 15143
  REGION 1..84: note = Description of Unknown:ENSG00000173567 known_neg_ctrl sequence

SEQ ID NO: 45594 - protein, 85 aa, unidentified
  REGION 1..85: note = Description of Unknown:ENSG00000173567 known_neg_ctrl sequence
GQSQAGGESGSGQLLDQENGAGESALVSVYVHLDFPDKTWPPELSRTLTLPAASASSSPRPLLTGLRLTTECNVNHKGNFYCACL

SEQ ID NO: 45595 - protein, 85 aa, unidentified
  REGION 1..85: note = Description of Unknown:ENSG00000173567 known_neg_ctrl sequence
SGYQWNTSICLHYPPCQSLHNHQPCGCLVFSHPEPGYCQLLPPGSPVTCLPAVPGILNLNSQLQMPGDTLSLTLHLSQEATNLSW

SEQ ID NO: 45596 - protein, 85 aa, unidentified
  REGION 1..85: note = Description of Unknown:ENSG00000173567 known_neg_ctrl sequence
FLRHPGSPSPILLQPGTQVSVTSSHGQAALSVSNMSHHWAGEYMSCFEAQGFKWNLYEVVRVPLKATDVARLPYQLSISCATSPG

SEQ ID NO: 45597 - protein, 85 aa, unidentified
  REGION 1..85: note = Description of Unknown:ENSG00000173567 known_neg_ctrl sequence
FQLSCCIPSTNLAYTAAWSPGEGSKASSFNESGSQCFVLAVQRCPMADTTYACDLQSLGLAPLRVPISITIIQDGDITCPEDASV

SEQ ID NO: 45598 - protein, 85 aa, unidentified
  REGION 1..85: note = Description of Unknown:ENSG00000173567 known_neg_ctrl sequence
LTWNVTKAGHVAQAPCPESKRGIVRRLCGADGVWGPVHSSCTDARLLALFTRTKLLQAGQGSPAEEVPQILAQLPGQAAEASSPS

SEQ ID NO: 45599 - protein, 85 aa, unidentified
  REGION 1..85: note = Description of Unknown:ENSG00000173567 known_neg_ctrl sequence
DLLTLLSTMKYVAKVVAEARIQLDRRALKNLLIATDKVLDMDTRSLWTLAQARKPWAGSTLLLAVETLACSLCPQDHPFAFSLPN

SEQ ID NO: 45600 - protein, 85 aa, unidentified
  REGION 1..85: note = Description of Unknown:ENSG00000173567 known_neg_ctrl sequence
VLLQSQLFGPTFPADYSISFPTRPPLQAQIPRHSLAPLVRNGTEISITSLVLRKLDHLLPSNYGQGLGDSLYATPGLVLVISIMA

SEQ ID NO: 45601 - protein, 85 aa, unidentified
  REGION 1..85: note = Description of Unknown:ENSG00000173567 known_neg_ctrl sequence
GDRAFSQGEVIMDFGNTDGSPHCVFWDHSLFQGRGGWSKEGCQAQVASASPTAQCLCQHLTAFSVLMSPHTVPEEPALALLTQVG

SEQ ID NO: 45602 - protein, 85 aa, unidentified
  REGION 1..85: note = Description of Unknown:ENSG00000173567 known_neg_ctrl sequence
LGASILALLVCLGVYWLVWRVVVRNKISYFRHAALLNMVFCLLAADTCFLGAPFLSPGPRSPLCLAAAFLCHFLYLATFFWMLAQ

SEQ ID NO: 45603 - protein, 85 aa, unidentified
  REGION 1..85: note = Description of Unknown:ENSG00000173567 known_neg_ctrl sequence
ALVLAHQLLFVFHQLAKHRVLPLMVLLGYLCPLGLAGVTLGLYLPQGQYLREGECWLDGKGGALYTFVGPVLAIIGVNGLVLAMA

SEQ ID NO: 45604 - protein, 85 aa, unidentified
  REGION 1..85: note = Description of Unknown:ENSG00000173567 known_neg_ctrl sequence
MLKLLRPSLSEGPPAEKRQALLGVIKALLILTPIFGLTWGLGLATLLEEVSTVPHYIFTILNTLQGVFILLFGCLMDRKIQEALR

SEQ ID NO: 45605 - protein, 85 aa, unidentified; identical to SEQ ID NO: 15077
  REGION 1..85: note = Description of Unknown:ENSG00000173567 known_neg_ctrl sequence

SEQ ID NO: 45606 - protein, 84 aa, unidentified; identical to SEQ ID NO: 15078
  REGION 1..84: note = Description of Unknown:ENSG00000173567 known_neg_ctrl sequence

SEQ ID NO: 45607 - protein, 85 aa, unidentified
  REGION 1..85: note = Description of Unknown:ENSG00000173567 known_neg_ctrl sequence
RMAKTGLPEKLPPSTSQALSALCWLFSAARWLTPRTLVTCRAWAWLHSGSPSPSPSSRMETSPALRTPRCSPGMSPRLATWHRPH

SEQ ID NO: 45608 - protein, 85 aa, unidentified; identical to SEQ ID NO: 15399
  REGION 1..85: note = Description of Unknown:ENSG00000124092 known_neg_ctrl sequence

SEQ ID NO: 45609 - protein, 85 aa, unidentified
  REGION 1..85: note = Description of Unknown:ENSG00000124092 known_neg_ctrl sequence
ANFIPTVYKCSKCGKGFSRWILWVGNSEVAELGGPGSGPLLRLQSGCPPGLHHPKAGLGPEDPLPGQLRHTTAGTGLSSLLQGPL

SEQ ID NO: 45610 - protein, 85 aa, unidentified; identical to SEQ ID NO: 15411
  REGION 1..85: note = Description of Unknown:ENSG00000173567 known_neg_ctrl sequence

SEQ ID NO: 45611 - protein, 85 aa, unidentified; identical to SEQ ID NO: 15412
  REGION 1..85: note = Description of Unknown:ENSG00000173567 known_neg_ctrl sequence

SEQ ID NO: 45612 - protein, 85 aa, unidentified; identical to SEQ ID NO: 15413
  REGION 1..85: note = Description of Unknown:ENSG00000173567 known_neg_ctrl sequence

SEQ ID NO: 45613 - protein, 85 aa, unidentified
  REGION 1..85: note = Description of Unknown:ENSG00000173567 known_neg_ctrl sequence
LGLAPLRVPISITIIQDGDITCPEDASVLTWNVTKAGHVAQAPCPESKRGIVRRLCGADGVWGPVHSSCTDARLLALFTRTKLLQ

SEQ ID NO: 45614 - protein, 85 aa, unidentified; identical to SEQ ID NO: 15415
  REGION 1..85: note = Description of Unknown:ENSG00000173567 known_neg_ctrl sequence

SEQ ID NO: 45615 - protein, 85 aa, unidentified; identical to SEQ ID NO: 15416
  REGION 1..85: note = Description of Unknown:ENSG00000173567 known_neg_ctrl sequence

SEQ ID NO: 45616 - protein, 85 aa, unidentified; identical to SEQ ID NO: 15417
  REGION 1..85: note = Description of Unknown:ENSG00000173567 known_neg_ctrl sequence

SEQ ID NO: 45617 - protein, 85 aa, unidentified; identical to SEQ ID NO: 15418
  REGION 1..85: note = Description of Unknown:ENSG00000173567 known_neg_ctrl sequence

SEQ ID NO: 45618 - protein, 85 aa, unidentified; identical to SEQ ID NO: 15419
  REGION 1..85: note = Description of Unknown:ENSG00000173567 known_neg_ctrl sequence

SEQ ID NO: 45619 - protein, 85 aa, unidentified; identical to SEQ ID NO: 15420
  REGION 1..85: note = Description of Unknown:ENSG00000173567 known_neg_ctrl sequence

SEQ ID NO: 45620 - protein, 85 aa, unidentified
  REGION 1..85: note = Description of Unknown:ENSG00000173567 known_neg_ctrl sequence
RMAKTGLPEKGQSQAGGESGSGQLLDQENGAGESALVSVYVHLDFPDKTWPPELSRTLTLPAASASSSPRPLLTGLRLTTECNVN

SEQ ID NO: 45621 - protein, 85 aa, unidentified
  REGION 1..85: note = Description of Unknown:ENSG00000173567 known_neg_ctrl sequence
HKGNFYCACLSGYQWNTSICLHYPPCQSLHNHQPCGCLVFSHPEPGYCQLLPPVPGILNLNSQLQMPGDTLSLTLHLSQEATNLS

SEQ ID NO: 45622 - protein, 85 aa, unidentified
  REGION 1..85: note = Description of Unknown:ENSG00000173567 known_neg_ctrl sequence
WFLRHPGSPSPILLQPGTQVSVTSSHGQAALSVSNMSHHWAGEYMSCFEAQGFKWNLYEVVRVPLKATDVARLPYQLSISCATSP

SEQ ID NO: 45623 - protein, 85 aa, unidentified
  REGION 1..85: note = Description of Unknown:ENSG00000173567 known_neg_ctrl sequence
GFQLSCCIPSTNLAYTAAWSPGEGSKASSFNESGSQCFVLAVQRCPMADTTYACDLQSLGLAPLRVPISITIIQDGDITCPEDAS

SEQ ID NO: 45624 - protein, 85 aa, unidentified
  REGION 1..85: note = Description of Unknown:ENSG00000173567 known_neg_ctrl sequence
VLTWNVTKAGHVAQAPCPESKRGIVRRLCGADGVWGPVHSSCTDARLLALFTRTKLLQAGQGSPAEEVPQILAQLPGQAAEASSP

SEQ ID NO: 45625 - protein, 85 aa, unidentified
  REGION 1..85: note = Description of Unknown:ENSG00000173567 known_neg_ctrl sequence
SDLLTLLSTMKYVAKVVAEARIQLDRRALKNLLIATDKVLDMDTRSLWTLAQARKPWAGSTLLLAVETLACSLCPQDHPFAFSLP

SEQ ID NO: 45626 - protein, 85 aa, unidentified
  REGION 1..85: note = Description of Unknown:ENSG00000173567 known_neg_ctrl sequence
NVLLQSQLFGPTFPADYSISFPTRPPLQAQIPRHSLAPLVRNGTEISITSLVLRKLDHLLPSNYGQGLGDSLYATPGLVLVISIM

SEQ ID NO: 45627 - protein, 85 aa, unidentified
  REGION 1..85: note = Description of Unknown:ENSG00000173567 known_neg_ctrl sequence
AGDRAFSQGEVIMDFGNTDGSPHCVFWDHSLFQGRGGWSKEGCQAQVASASPTAQCLCQHLTAFSVLMSPHTVPEEPALALLTQV

SEQ ID NO: 45628 - protein, 85 aa, unidentified
  REGION 1..85: note = Description of Unknown:ENSG00000173567 known_neg_ctrl sequence
GLGASILALLVCLGVYWLVWRVVVRNKISYFRHAALLNMVFCLLAADTCFLGAPFLSPGPRSPLCLAAAFLCHFLYLATFFWMLA

SEQ ID NO: 45629 - protein, 85 aa, unidentified
  REGION 1..85: note = Description of Unknown:ENSG00000173567 known_neg_ctrl sequence
QALVLAHQLLFVFHQLAKHRVLPLMVLLGYLCPLGLAGVTLGLYLPQGQYLREGECWLDGKGGALYTFVGPVLAIIGVNGLVLAM

SEQ ID NO: 45630 - protein, 85 aa, unidentified
  REGION 1..85: note = Description of Unknown:ENSG00000173567 known_neg_ctrl sequence
AMLKLLRPSLSEGPPAEKRQALLGVIKALLILTPIFGLTWGLGLATLLEEVSTVPHYIFTILNTLQGVFILLFGCLMDRKIQEAL

SEQ ID NO: 45631 - protein, 85 aa, unidentified
  REGION 1..85: note = Description of Unknown:ENSG00000124092 known_neg_ctrl sequence
ANFIPTVYKCSKCGKGFSRWINLHRHSEKCGSGEAKSAASGKGRRTRKRKQTILKEATKGQKEAAKGWKEAANGDGVISAHRNLC

SEQ ID NO: 45632 - protein, 84 aa, unidentified; identical to SEQ ID NO: 15302
  REGION 1..84: note = Description of Unknown:ENSG00000124092 known_neg_ctrl sequence

SEQ ID NO: 45633 - protein, 85 aa, unidentified
  REGION 1..85: note = Description of Unknown:ENSG00000204246 known_neg_ctrl sequence
GEINQTLVSEFLLLGLSGYPKIEIVYFALILVMYLVILIGNGVLIIASIFDSHFHTPMYFFLGNLSFLDICYTSSSVPSTLVSLI

SEQ ID NO: 45634 - protein, 85 aa, unidentified
  REGION 1..85: note = Description of Unknown:ENSG00000204246 known_neg_ctrl sequence
SKKRNISFSGCAVQMFFGFAMGSTECLLLGMMAFDRYVAICNPLRYPIILSKVAYVLMASVSWLSGGINSAVQTLLAMRLPFCGN

SEQ ID NO: 45635 - protein, 85 aa, unidentified
  REGION 1..85: note = Description of Unknown:ENSG00000204246 known_neg_ctrl sequence
NIINHFACEILAVLKLACADISLNIITMVISNMAFLVLPLMVIFFSYMFILYTILQMNSATGRRKAFSTCSAHLTVVIIFYGTIF

SEQ ID NO: 45636 - protein, 85 aa, unidentified
  REGION 1..85: note = Description of Unknown:ENSG00000204246 known_neg_ctrl sequence
ALILVMYLVILIGNGVLIIASIFDSHFHTPMYFFLGNLSFLDICYTSSSVPSTLVSLISKKRNISFSGCAVQMFFGFAMGSTECL

SEQ ID NO: 45637 - protein, 85 aa, unidentified
  REGION 1..85: note = Description of Unknown:ENSG00000204246 known_neg_ctrl sequence
LLGMMAFDRYVAICNPLRYPIILSKVAYVLMASVSWLSGGINSAVQTLLAMRLPFCGNNIINHFACEILAVLKLACADISLNIIT

SEQ ID NO: 45638 - protein, 85 aa, unidentified
  REGION 1..85: note = Description of Unknown:ENSG00000204246 known_neg_ctrl sequence
MVISNMAFLVLPLMVIFFSYMFILYTILQMNSATGRRKAFSTCSAHLTVVIIFYGTIFFMYAKPKSQDLIGEEKLQALDKLISLF

SEQ ID NO: 45639 - protein, 85 aa, unidentified; identical to SEQ ID NO: 15361
  REGION 1..85: note = Description of Unknown:ENSG00000124092 known_neg_ctrl sequence

SEQ ID NO: 45640 - protein, 84 aa, unidentified; identical to SEQ ID NO: 15362
  REGION 1..84: note = Description of Unknown:ENSG00000124092 known_neg_ctrl sequence

SEQ ID NO: 45641 - protein, 85 aa, unidentified; identical to SEQ ID NO: 13606
  REGION 1..85: note = Description of Unknown:random_neg_ctrl neg_ctrl sequence

SEQ ID NO: 45642 - protein, 85 aa, unidentified; identical to SEQ ID NO: 13607
  REGION 1..85: note = Description of Unknown:random_neg_ctrl neg_ctrl sequence

SEQ ID NO: 45643 - protein, 85 aa, unidentified; identical to SEQ ID NO: 13608
  REGION 1..85: note = Description of Unknown:random_neg_ctrl neg_ctrl sequence

SEQ ID NO: 45644 - protein, 71 aa, unidentified; identical to SEQ ID NO: 13609
  REGION 1..71: note = Description of Unknown:random_neg_ctrl neg_ctrl sequence

SEQ ID NO: 45645 - protein, 85 aa, unidentified; identical to SEQ ID NO: 13610
  REGION 1..85: note = Description of Unknown:random_neg_ctrl neg_ctrl sequence

SEQ ID NO: 45646 - protein, 85 aa, unidentified; identical to SEQ ID NO: 13611
  REGION 1..85: note = Description of Unknown:random_neg_ctrl neg_ctrl sequence

SEQ ID NO: 45647 - protein, 85 aa, unidentified; identical to SEQ ID NO: 13612
  REGION 1..85: note = Description of Unknown:random_neg_ctrl neg_ctrl sequence

SEQ ID NO: 45648 - protein, 85 aa, unidentified; identical to SEQ ID NO: 13613
  REGION 1..85: note = Description of Unknown:random_neg_ctrl neg_ctrl sequence

SEQ ID NO: 45649 - protein, 85 aa, unidentified; identical to SEQ ID NO: 13614
  REGION 1..85: note = Description of Unknown:random_neg_ctrl neg_ctrl sequence

SEQ ID NO: 45650 - protein, 85 aa, unidentified
  REGION 1..85: note = Description of Unknown:random_neg_ctrl neg_ctrl sequence
LLAGFYLFSKAPNQHVGELSMLEDRLTAARPEVPDAPEKVRAATFEFGYLKVLTGTSSRLESKGSEGLLLQLSAKRISERAYEDQ

SEQ ID NO: 45651 - protein, 85 aa, unidentified; identical to SEQ ID NO: 13616
  REGION 1..85: note = Description of Unknown:random_neg_ctrl neg_ctrl sequence

SEQ ID NO: 45652 - protein, 85 aa, unidentified; identical to SEQ ID NO: 13617
  REGION 1..85: note = Description of Unknown:random_neg_ctrl neg_ctrl sequence

SEQ ID NO: 45653 - protein, 85 aa, unidentified; identical to SEQ ID NO: 13618
  REGION 1..85: note = Description of Unknown:random_neg_ctrl neg_ctrl sequence

SEQ ID NO: 45654 - protein, 85 aa, unidentified; identical to SEQ ID NO: 13619
  REGION 1..85: note = Description of Unknown:random_neg_ctrl neg_ctrl sequence

SEQ ID NO: 45655 - protein, 21 aa, unidentified
  REGION 1..21: note = Description of Unknown:random_neg_ctrl neg_ctrl sequence
LTAVEKCELAVRNRPREKWSS

SEQ ID NO: 45656 - protein, 85 aa, unidentified; identical to SEQ ID NO: 13621
  REGION 1..85: note = Description of Unknown:random_neg_ctrl neg_ctrl sequence

SEQ ID NO: 45657 - protein, 85 aa, unidentified; identical to SEQ ID NO: 13622
  REGION 1..85: note = Description of Unknown:random_neg_ctrl neg_ctrl sequence

SEQ ID NO: 45658 - protein, 32 aa, unidentified; identical to SEQ ID NO: 13623
  REGION 1..32: note = Description of Unknown:random_neg_ctrl neg_ctrl sequence

SEQ ID NO: 45659 - protein, 85 aa, unidentified; identical to SEQ ID NO: 13624
  REGION 1..85: note = Description of Unknown:random_neg_ctrl neg_ctrl sequence

SEQ ID NO: 45660 - protein, 85 aa, unidentified; identical to SEQ ID NO: 13625
  REGION 1..85: note = Description of Unknown:random_neg_ctrl neg_ctrl sequence

SEQ ID NO: 45661 - protein, 85 aa, unidentified; identical to SEQ ID NO: 13626
  REGION 1..85: note = Description of Unknown:random_neg_ctrl neg_ctrl sequence

SEQ ID NO: 45662 - protein, 85 aa, unidentified; identical to SEQ ID NO: 13627
  REGION 1..85: note = Description of Unknown:random_neg_ctrl neg_ctrl sequence

SEQ ID NO: 45663 - protein, 85 aa, unidentified; identical to SEQ ID NO: 13628
  REGION 1..85: note = Description of Unknown:random_neg_ctrl neg_ctrl sequence

SEQ ID NO: 45664 - protein, 85 aa, unidentified; identical to SEQ ID NO: 13629
  REGION 1..85: note = Description of Unknown:random_neg_ctrl neg_ctrl sequence

SEQ ID NO: 45665 - protein, 85 aa, unidentified; identical to SEQ ID NO: 13630
  REGION 1..85: note = Description of Unknown:random_neg_ctrl neg_ctrl sequence

SEQ ID NO: 45666 - protein, 85 aa, unidentified; identical to SEQ ID NO: 13631
  REGION 1..85: note = Description of Unknown:random_neg_ctrl neg_ctrl sequence

SEQ ID NO: 45667 - protein, 40 aa, unidentified; identical to SEQ ID NO: 13632
  REGION 1..40: note = Description of Unknown:random_neg_ctrl neg_ctrl sequence

SEQ ID NO: 45668 - protein, 85 aa, unidentified; identical to SEQ ID NO: 13633
  REGION 1..85: note = Description of Unknown:random_neg_ctrl neg_ctrl sequence

SEQ ID NO: 45669 - protein, 85 aa, unidentified; identical to SEQ ID NO: 13634
  REGION 1..85: note = Description of Unknown:random_neg_ctrl neg_ctrl sequence

SEQ ID NO: 45670 - protein, 85 aa, unidentified; identical to SEQ ID NO: 13635
  REGION 1..85: note = Description of Unknown:random_neg_ctrl neg_ctrl sequence

SEQ ID NO: 45671 - protein, 85 aa, unidentified; identical to SEQ ID NO: 13636
  REGION 1..85: note = Description of Unknown:random_neg_ctrl neg_ctrl sequence

SEQ ID NO: 45672 - protein, 11 aa, unidentified
  REGION 1..11: note = Description of Unknown:random_neg_ctrl neg_ctrl sequence
QVGTGVVEKRY

SEQ ID NO: 45673 - protein, 85 aa, unidentified; identical to SEQ ID NO: 13638
  REGION 1..85: note = Description of Unknown:random_neg_ctrl neg_ctrl sequence

SEQ ID NO: 45674 - protein, 85 aa, unidentified; identical to SEQ ID NO: 13639
  REGION 1..85: note = Description of Unknown:random_neg_ctrl neg_ctrl sequence

SEQ ID NO: 45675 - protein, 85 aa, unidentified
  REGION 1..85: note = Description of Unknown:random_neg_ctrl neg_ctrl sequence
LAQLESIGTEPFGVHTLGVHSSRVRHGITFKTRVSQSLHSGLNKTMINLSPGKELRGSEPEIWKDWELGEGKIPIKVEAVLSAEP

SEQ ID NO: 45676 - protein, 85 aa, unidentified; identical to SEQ ID NO: 13641
  REGION 1..85: note = Description of Unknown:random_neg_ctrl neg_ctrl sequence

SEQ ID NO: 45677 - protein, 85 aa, unidentified; identical to SEQ ID NO: 13642
  REGION 1..85: note = Description of Unknown:random_neg_ctrl neg_ctrl sequence

SEQ ID NO: 45678 - protein, 85 aa, unidentified
  REGION 1..85: note = Description of Unknown:random_neg_ctrl neg_ctrl sequence
LDVKNRCIVGLFLDIKSCAEHQHKLPEACDEVEHYECISAILNLTIIGGILEPSKMTGSATDTQSPKRQYNVMHEVEVGFNDRDA

SEQ ID NO: 45679 - protein, 12 aa, unidentified
  REGION 1..12: note = Description of Unknown:random_neg_ctrl neg_ctrl sequence
KPGGYSWNNTDP

SEQ ID NO: 45680 - protein, 85 aa, unidentified; identical to SEQ ID NO: 13645
  REGION 1..85: note = Description of Unknown:random_neg_ctrl neg_ctrl sequence

SEQ ID NO: 45681 - protein, 85 aa, unidentified; identical to SEQ ID NO: 13646
  REGION 1..85: note = Description of Unknown:random_neg_ctrl neg_ctrl sequence

SEQ ID NO: 45682 - protein, 85 aa, unidentified; identical to SEQ ID NO: 13647
  REGION 1..85: note = Description of Unknown:random_neg_ctrl neg_ctrl sequence

SEQ ID NO: 45683 - protein, 85 aa, unidentified; identical to SEQ ID NO: 13648
  REGION 1..85: note = Description of Unknown:random_neg_ctrl neg_ctrl sequence

SEQ ID NO: 45684 - protein, 85 aa, unidentified; identical to SEQ ID NO: 13649
  REGION 1..85: note = Description of Unknown:random_neg_ctrl neg_ctrl sequence

SEQ ID NO: 45685 - protein, 85 aa, unidentified; identical to SEQ ID NO: 13650
  REGION 1..85: note = Description of Unknown:random_neg_ctrl neg_ctrl sequence

SEQ ID NO: 45686 - protein, 85 aa, unidentified; identical to SEQ ID NO: 13651
  REGION 1..85: note = Description of Unknown:random_neg_ctrl neg_ctrl sequence

SEQ ID NO: 45687 - protein, 85 aa, unidentified; identical to SEQ ID NO: 13652
  REGION 1..85: note = Description of Unknown:random_neg_ctrl neg_ctrl sequence

SEQ ID NO: 45688 - protein, 85 aa, unidentified
  REGION 1..85: note = Description of Unknown:random_neg_ctrl neg_ctrl sequence
LIGVPGCNSVLREFRVRESDIPSDNKSITITLIAFCAESGCATTIIGGPTESEARKTMGPGPLEQKLPVIISVLPTRMECSGYSL

SEQ ID NO: 45689 - protein, 85 aa, unidentified; identical to SEQ ID NO: 13654
  REGION 1..85: note = Description of Unknown:random_neg_ctrl neg_ctrl sequence

SEQ ID NO: 45690 - protein, 85 aa, unidentified; identical to SEQ ID NO: 13655
  REGION 1..85: note = Description of Unknown:random_neg_ctrl neg_ctrl sequence

SEQ ID NO: 45691 - protein, 51 aa, unidentified; identical to SEQ ID NO: 13656
  REGION 1..51: note = Description of Unknown:random_neg_ctrl neg_ctrl sequence

SEQ ID NO: 45692 - protein, 85 aa, unidentified; identical to SEQ ID NO: 13657
  REGION 1..85: note = Description of Unknown:random_neg_ctrl neg_ctrl sequence

SEQ ID NO: 45693 - protein, 85 aa, unidentified; identical to SEQ ID NO: 13658
  REGION 1..85: note = Description of Unknown:random_neg_ctrl neg_ctrl sequence

SEQ ID NO: 45694 - protein, 85 aa, unidentified; identical to SEQ ID NO: 13659
  REGION 1..85: note = Description of Unknown:random_neg_ctrl neg_ctrl sequence

SEQ ID NO: 45695 - protein, 85 aa, unidentified; identical to SEQ ID NO: 13660
  REGION 1..85: note = Description of Unknown:random_neg_ctrl neg_ctrl sequence

SEQ ID NO: 45696 - protein, 57 aa, unidentified; identical to SEQ ID NO: 13661
  REGION 1..57: note = Description of Unknown:random_neg_ctrl neg_ctrl sequence

SEQ ID NO: 45697 - protein, 85 aa, unidentified; identical to SEQ ID NO: 13662
  REGION 1..85: note = Description of Unknown:random_neg_ctrl neg_ctrl sequence

SEQ ID NO: 45698 - protein, 85 aa, unidentified; identical to SEQ ID NO: 13663
  REGION 1..85: note = Description of Unknown:random_neg_ctrl neg_ctrl sequence

SEQ ID NO: 45699 - protein, 85 aa, unidentified; identical to SEQ ID NO: 13664
  REGION 1..85: note = Description of Unknown:random_neg_ctrl neg_ctrl sequence

SEQ ID NO: 45700 - protein, 84 aa, unidentified; identical to SEQ ID NO: 13665
  REGION 1..84: note = Description of Unknown:random_neg_ctrl neg_ctrl sequence

SEQ ID NO: 45701 - protein, 85 aa, unidentified; identical to SEQ ID NO: 13666
  REGION 1..85: note = Description of Unknown:random_neg_ctrl neg_ctrl sequence

SEQ ID NO: 45702 - protein, 85 aa, unidentified; identical to SEQ ID NO: 13667
  REGION 1..85: note = Description of Unknown:random_neg_ctrl neg_ctrl sequence

SEQ ID NO: 45703 - protein, 85 aa, unidentified; identical to SEQ ID NO: 13668
  REGION 1..85: note = Description of Unknown:random_neg_ctrl neg_ctrl sequence

SEQ ID NO: 45704 - protein, 85 aa, unidentified; identical to SEQ ID NO: 13669
  REGION 1..85: note = Description of Unknown:random_neg_ctrl neg_ctrl sequence

SEQ ID NO: 45705 - protein, 85 aa, unidentified; identical to SEQ ID NO: 13670
  REGION 1..85: note = Description of Unknown:random_neg_ctrl neg_ctrl sequence

SEQ ID NO: 45706 - protein, 85 aa, unidentified; identical to SEQ ID NO: 13671
  REGION 1..85: note = Description of Unknown:random_neg_ctrl neg_ctrl sequence

SEQ ID NO: 45707 - protein, 85 aa, unidentified; identical to SEQ ID NO: 13672
  REGION 1..85: note = Description of Unknown:random_neg_ctrl neg_ctrl sequence

SEQ ID NO: 45708 - protein, 85 aa, unidentified; identical to SEQ ID NO: 13673
  REGION 1..85: note = Description of Unknown:random_neg_ctrl neg_ctrl sequence

SEQ ID NO: 45709 - protein, 85 aa, unidentified; identical to SEQ ID NO: 13674
  REGION 1..85: note = Description of Unknown:random_neg_ctrl neg_ctrl sequence

SEQ ID NO: 45710 - protein, 85 aa, unidentified; identical to SEQ ID NO: 13675
  REGION 1..85: note = Description of Unknown:random_neg_ctrl neg_ctrl sequence

SEQ ID NO: 45711 - protein, 12 aa, unidentified
  REGION 1..12: note = Description of Unknown:random_neg_ctrl neg_ctrl sequence
SAMEASYYVAKV

SEQ ID NO: 45712 - protein, 85 aa, unidentified; identical to SEQ ID NO: 13677
  REGION 1..85: note = Description of Unknown:random_neg_ctrl neg_ctrl sequence

SEQ ID NO: 45713 - protein, 85 aa, unidentified; identical to SEQ ID NO: 13678
  REGION 1..85: note = Description of Unknown:random_neg_ctrl neg_ctrl sequence

SEQ ID NO: 45714 - protein, 85 aa, unidentified; identical to SEQ ID NO: 13679
  REGION 1..85: note = Description of Unknown:random_neg_ctrl neg_ctrl sequence

SEQ ID NO: 45715 - protein, 84 aa, unidentified; identical to SEQ ID NO: 13680
  REGION 1..84: note = Description of Unknown:random_neg_ctrl neg_ctrl sequence

SEQ ID NO: 45716 - protein, 85 aa, unidentified; identical to SEQ ID NO: 13681
  REGION 1..85: note = Description of Unknown:random_neg_ctrl neg_ctrl sequence

SEQ ID NO: 45717 - protein, 85 aa, unidentified; identical to SEQ ID NO: 13682
  REGION 1..85: note = Description of Unknown:random_neg_ctrl neg_ctrl sequence

SEQ ID NO: 45718 - protein, 84 aa, unidentified; identical to SEQ ID NO: 13683
  REGION 1..84: note = Description of Unknown:random_neg_ctrl neg_ctrl sequence

SEQ ID NO: 45719 - protein, 85 aa, unidentified; identical to SEQ ID NO: 13684
  REGION 1..85: note = Description of Unknown:random_neg_ctrl neg_ctrl sequence

SEQ ID NO: 45720 - protein, 85 aa, unidentified; identical to SEQ ID NO: 13685
  REGION 1..85: note = Description of Unknown:random_neg_ctrl neg_ctrl sequence

SEQ ID NO: 45721 - protein, 85 aa, unidentified; identical to SEQ ID NO: 13686
  REGION 1..85: note = Description of Unknown:random_neg_ctrl neg_ctrl sequence

SEQ ID NO: 45722 - protein, 34 aa, unidentified; identical to SEQ ID NO: 13687
  REGION 1..34: note = Description of Unknown:random_neg_ctrl neg_ctrl sequence

SEQ ID NO: 45723 - protein, 85 aa, unidentified
  REGION 1..85: note = Description of Unknown:random_neg_ctrl neg_ctrl sequence
LSDEALLLSLECDSLQPILLSENGDPEKPIITEREVPEHFPRGSPPKTRLDLPKSAISETHSLISTSGTGETSEATVMLSESNLK

SEQ ID NO: 45724 - protein, 84 aa, unidentified; identical to SEQ ID NO: 13689
  REGION 1..84: note = Description of Unknown:random_neg_ctrl neg_ctrl sequence

SEQ ID NO: 45725 - protein, 84 aa, unidentified; identical to SEQ ID NO: 13690
  REGION 1..84: note = Description of Unknown:random_neg_ctrl neg_ctrl sequence

SEQ ID NO: 45726 - protein, 85 aa, unidentified; identical to SEQ ID NO: 13691
  REGION 1..85: note = Description of Unknown:random_neg_ctrl neg_ctrl sequence

SEQ ID NO: 45727 - protein, 85 aa, unidentified; identical to SEQ ID NO: 13692
  REGION 1..85: note = Description of Unknown:random_neg_ctrl neg_ctrl sequence

SEQ ID NO: 45728 - protein, 85 aa, unidentified; identical to SEQ ID NO: 13693
  REGION 1..85: note = Description of Unknown:random_neg_ctrl neg_ctrl sequence

SEQ ID NO: 45729 - protein, 85 aa, unidentified; identical to SEQ ID NO: 13694
  REGION 1..85: note = Description of Unknown:random_neg_ctrl neg_ctrl sequence

SEQ ID NO: 45730 - protein, 85 aa, unidentified; identical to SEQ ID NO: 13695
  REGION 1..85: note = Description of Unknown:random_neg_ctrl neg_ctrl sequence

SEQ ID NO: 45731 - protein, 85 aa, unidentified; identical to SEQ ID NO: 13696
  REGION 1..85: note = Description of Unknown:random_neg_ctrl neg_ctrl sequence

SEQ ID NO: 45732 - protein, 85 aa, unidentified; identical to SEQ ID NO: 13697
  REGION 1..85: note = Description of Unknown:random_neg_ctrl neg_ctrl sequence

SEQ ID NO: 45733 - protein, 85 aa, unidentified; identical to SEQ ID NO: 13698
  REGION 1..85: note = Description of Unknown:random_neg_ctrl neg_ctrl sequence

SEQ ID NO: 45734 - protein, 45 aa, unidentified; identical to SEQ ID NO: 13699
  REGION 1..45: note = Description of Unknown:random_neg_ctrl neg_ctrl sequence

SEQ ID NO: 45735 - protein, 85 aa, unidentified; identical to SEQ ID NO: 13700
  REGION 1..85: note = Description of Unknown:random_neg_ctrl neg_ctrl sequence

SEQ ID NO: 45736 - protein, 85 aa, unidentified; identical to SEQ ID NO: 13701
  REGION 1..85: note = Description of Unknown:random_neg_ctrl neg_ctrl sequence

SEQ ID NO: 45737 - protein, 14 aa, unidentified
  REGION 1..14: note = Description of Unknown:random_neg_ctrl neg_ctrl sequence
GAAEPDYCESPSEI

SEQ ID NO: 45738 - protein, 85 aa, unidentified; identical to SEQ ID NO: 13703
  REGION 1..85: note = Description of Unknown:random_neg_ctrl neg_ctrl sequence

SEQ ID NO: 45739 - protein, 85 aa, unidentified; identical to SEQ ID NO: 13704
  REGION 1..85: note = Description of Unknown:random_neg_ctrl neg_ctrl sequence

SEQ ID NO: 45740 - protein, 85 aa, unidentified
  REGION 1..85: note = Description of Unknown:random_neg_ctrl neg_ctrl sequence
LSTTELATTWETRSEEALEENGWRALMSWILTGAADGDSAGHQDSFINLCEAERMKFRSTPLKEIPILVGSPGGANAAYADNLAL

SEQ ID NO: 45741 - protein, 85 aa, unidentified; identical to SEQ ID NO: 13706
  REGION 1..85: note = Description of Unknown:random_neg_ctrl neg_ctrl sequence

SEQ ID NO: 45742 - protein, 85 aa, unidentified; identical to SEQ ID NO: 13707
  REGION 1..85: note = Description of Unknown:random_neg_ctrl neg_ctrl sequence

SEQ ID NO: 45743 - protein, 80 aa, unidentified; identical to SEQ ID NO: 13708
  REGION 1..80: note = Description of Unknown:random_neg_ctrl neg_ctrl sequence

SEQ ID NO: 45744 - protein, 53 aa, unidentified; identical to SEQ ID NO: 13709
  REGION 1..53: note = Description of Unknown:random_neg_ctrl neg_ctrl sequence

SEQ ID NO: 45745 - protein, 45 aa, unidentified
  REGION 1..45: note = Description of Unknown:random_neg_ctrl neg_ctrl sequence
LKLLCEGFSPGGVSQAGDRQSDHSFFVEMEFDLILTVDEDRSQIK

SEQ ID NO: 45746 - protein, 85 aa, unidentified; identical to SEQ ID NO: 13711
  REGION 1..85: note = Description of Unknown:random_neg_ctrl neg_ctrl sequence

SEQ ID NO: 45747 - protein, 40 aa, unidentified; identical to SEQ ID NO: 13712
  REGION 1..40: note = Description of Unknown:random_neg_ctrl neg_ctrl sequence

SEQ ID NO: 45748 - protein, 8 aa, unidentified
  REGION 1..8: note = Description of Unknown:random_neg_ctrl neg_ctrl sequence
IVLGKSQY

SEQ ID NO: 45749 - protein, 85 aa, unidentified; identical to SEQ ID NO: 13714
  REGION 1..85: note = Description of Unknown:random_neg_ctrl neg_ctrl sequence

SEQ ID NO: 45750 - protein, 9 aa, unidentified
  REGION 1..9: note = Description of Unknown:random_neg_ctrl neg_ctrl sequence
ESEDEAPVQ

SEQ ID NO: 45751 - protein, 84 aa, unidentified; identical to SEQ ID NO: 13716
  REGION 1..84: note = Description of Unknown:random_neg_ctrl neg_ctrl sequence

SEQ ID NO: 45752 - protein, 85 aa, unidentified; identical to SEQ ID NO: 13717
  REGION 1..85: note = Description of Unknown:random_neg_ctrl neg_ctrl sequence

SEQ ID NO: 45753 - protein, 85 aa, unidentified; identical to SEQ ID NO: 13718
  REGION 1..85: note = Description of Unknown:random_neg_ctrl neg_ctrl sequence

SEQ ID NO: 45754 - protein, 85 aa, unidentified
  REGION 1..85: note = Description of Unknown:random_neg_ctrl neg_ctrl sequence
LSLNLSNEKVPQEQTDNIPSESSPEPVRTLVVQAHPEFKIIGETLPTGLVVEKTFWENCQVDLIAAPNPEYGVLLSLCKANFTHL

SEQ ID NO: 45755 - protein, 51 aa, unidentified; identical to SEQ ID NO: 13720
  REGION 1..51: note = Description of Unknown:random_neg_ctrl neg_ctrl sequence

SEQ ID NO: 45756 - protein, 85 aa, unidentified; identical to SEQ ID NO: 13721
  REGION 1..85: note = Description of Unknown:random_neg_ctrl neg_ctrl sequence

SEQ ID NO: 45757 - protein, 85 aa, unidentified; identical to SEQ ID NO: 13722
  REGION 1..85: note = Description of Unknown:random_neg_ctrl neg_ctrl sequence

SEQ ID NO: 45758 - protein, 85 aa, unidentified
  REGION 1..85: note = Description of Unknown:random_neg_ctrl neg_ctrl sequence
LLAKWEECMYKISHAVLIKMNPPGREMLREIRAEINSFSNYEAQNLGIKIGVLHGPSVSKMCVVESGSLRMVNMCDGCYLNPTQV

SEQ ID NO: 45759 - protein, 85 aa, unidentified; identical to SEQ ID NO: 13724
  REGION 1..85: note = Description of Unknown:random_neg_ctrl neg_ctrl sequence

SEQ ID NO: 45760 - protein, 84 aa, unidentified; identical to SEQ ID NO: 13725
  REGION 1..84: note = Description of Unknown:random_neg_ctrl neg_ctrl sequence

SEQ ID NO: 45761 - protein, 85 aa, unidentified; identical to SEQ ID NO: 13726
  REGION 1..85: note = Description of Unknown:random_neg_ctrl neg_ctrl sequence

SEQ ID NO: 45762 - protein, 85 aa, unidentified; identical to SEQ ID NO: 13727
  REGION 1..85: note = Description of Unknown:random_neg_ctrl neg_ctrl sequence

SEQ ID NO: 45763 - protein, 85 aa, unidentified; identical to SEQ ID NO: 13728
  REGION 1..85: note = Description of Unknown:random_neg_ctrl neg_ctrl sequence

SEQ ID NO: 45764 - protein, 85 aa, unidentified; identical to SEQ ID NO: 13729
  REGION 1..85: note = Description of Unknown:random_neg_ctrl neg_ctrl sequence

SEQ ID NO: 45765 - protein, 85 aa, unidentified; identical to SEQ ID NO: 13730
  REGION 1..85: note = Description of Unknown:random_neg_ctrl neg_ctrl sequence

SEQ ID NO: 45766 - protein, 84 aa, unidentified; identical to SEQ ID NO: 13731
  REGION 1..84: note = Description of Unknown:random_neg_ctrl neg_ctrl sequence

SEQ ID NO: 45767 - protein, 85 aa, unidentified; identical to SEQ ID NO: 13732
  REGION 1..85: note = Description of Unknown:random_neg_ctrl neg_ctrl sequence

SEQ ID NO: 45768 - protein, 85 aa, unidentified; identical to SEQ ID NO: 13733
  REGION 1..85: note = Description of Unknown:random_neg_ctrl neg_ctrl sequence

SEQ ID NO: 45769 - protein, 85 aa, unidentified; identical to SEQ ID NO: 13734
  REGION 1..85: note = Description of Unknown:random_neg_ctrl neg_ctrl sequence

SEQ ID NO: 45770 - protein, 85 aa, unidentified; identical to SEQ ID NO: 13735
  REGION 1..85: note = Description of Unknown:random_neg_ctrl neg_ctrl sequence

SEQ ID NO: 45771 - protein, 85 aa, unidentified
  REGION 1..85: note = Description of Unknown:random_neg_ctrl neg_ctrl sequence
LEKFFHKLNHSKKSPDELYPPDRVFNPPGELYCGSQGHGSHNFGSYPRREYKRKKLLATLCAKVANSHEVRTKGIEQQTQLGMKG

SEQ ID NO: 45772 - protein, 84 aa, unidentified; identical to SEQ ID NO: 13737
  REGION 1..84: note = Description of Unknown:random_neg_ctrl neg_ctrl sequence

SEQ ID NO: 45773 - protein, 85 aa, unidentified; identical to SEQ ID NO: 13738
  REGION 1..85: note = Description of Unknown:random_neg_ctrl neg_ctrl sequence

SEQ ID NO: 45774 - protein, 85 aa, unidentified; identical to SEQ ID NO: 13739
  REGION 1..85: note = Description of Unknown:random_neg_ctrl neg_ctrl sequence

SEQ ID NO: 45775 - protein, 37 aa, unidentified; identical to SEQ ID NO: 13740
  REGION 1..37: note = Description of Unknown:random_neg_ctrl neg_ctrl sequence

SEQ ID NO: 45776 - protein, 85 aa, unidentified; identical to SEQ ID NO: 13741
  REGION 1..85: note = Description of Unknown:random_neg_ctrl neg_ctrl sequence

SEQ ID NO: 45777 - protein, 85 aa, unidentified; identical to SEQ ID NO: 13742
  REGION 1..85: note = Description of Unknown:random_neg_ctrl neg_ctrl sequence

SEQ ID NO: 45778 - protein, 75 aa, unidentified
  REGION 1..75: note = Description of Unknown:random_neg_ctrl neg_ctrl sequence
LQSRGAQYGGLLAPDVGENKLPGIGSKTSVKEMHNHEQFGIDPKWEVSQGQEQIFINEKRKVLKGLESGFAKSDE

SEQ ID NO: 45779 - protein, 85 aa, unidentified; identical to SEQ ID NO: 13744
  REGION 1..85: note = Description of Unknown:random_neg_ctrl neg_ctrl sequence

SEQ ID NO: 45780 - protein, 85 aa, unidentified; identical to SEQ ID NO: 13745
  REGION 1..85: note = Description of Unknown:random_neg_ctrl neg_ctrl sequence

SEQ ID NO: 45781 - protein, 85 aa, unidentified; identical to SEQ ID NO: 13746
  REGION 1..85: note = Description of Unknown:random_neg_ctrl neg_ctrl sequence

SEQ ID NO: 45782 - protein, 81 aa, unidentified; identical to SEQ ID NO: 13747
  REGION 1..81: note = Description of Unknown:random_neg_ctrl neg_ctrl sequence

SEQ ID NO: 45783 - protein, 85 aa, unidentified; identical to SEQ ID NO: 13748
  REGION 1..85: note = Description of Unknown:random_neg_ctrl neg_ctrl sequence

SEQ ID NO: 45784 - protein, 85 aa, unidentified; identical to SEQ ID NO: 13749
  REGION 1..85: note = Description of Unknown:random_neg_ctrl neg_ctrl sequence

SEQ ID NO: 45785 - protein, 84 aa, unidentified; identical to SEQ ID NO: 13750
  REGION 1..84: note = Description of Unknown:random_neg_ctrl neg_ctrl sequence

SEQ ID NO: 45786 - protein, 85 aa, unidentified; identical to SEQ ID NO: 13751
  REGION 1..85: note = Description of Unknown:random_neg_ctrl neg_ctrl sequence

SEQ ID NO: 45787 - protein, 85 aa, unidentified; identical to SEQ ID NO: 13752
  REGION 1..85: note = Description of Unknown:random_neg_ctrl neg_ctrl sequence

SEQ ID NO: 45788 - protein, 84 aa, unidentified; identical to SEQ ID NO: 13753
  REGION 1..84: note = Description of Unknown:random_neg_ctrl neg_ctrl sequence

SEQ ID NO: 45789 - protein, 85 aa, unidentified; identical to SEQ ID NO: 13754
  REGION 1..85: note = Description of Unknown:random_neg_ctrl neg_ctrl sequence

SEQ ID NO: 45790 - protein, 85 aa, unidentified; identical to SEQ ID NO: 13755
  REGION 1..85: note = Description of Unknown:random_neg_ctrl neg_ctrl sequence

SEQ ID NO: 45791 - protein, 85 aa, unidentified; identical to SEQ ID NO: 13756
  REGION 1..85: note = Description of Unknown:random_neg_ctrl neg_ctrl sequence

SEQ ID NO: 45792 - protein, 85 aa, unidentified; identical to SEQ ID NO: 13757
  REGION 1..85: note = Description of Unknown:random_neg_ctrl neg_ctrl sequence

SEQ ID NO: 45793 - protein, 85 aa, unidentified; identical to SEQ ID NO: 13758
  REGION 1..85: note = Description of Unknown:random_neg_ctrl neg_ctrl sequence

SEQ ID NO: 45794 - protein, 41 aa, unidentified; identical to SEQ ID NO: 13759
  REGION 1..41: note = Description of Unknown:random_neg_ctrl neg_ctrl sequence

SEQ ID NO: 45795 - protein, 85 aa, unidentified; identical to SEQ ID NO: 13760
  REGION 1..85: note = Description of Unknown:random_neg_ctrl neg_ctrl sequence

SEQ ID NO: 45796 - protein, 84 aa, unidentified; identical to SEQ ID NO: 13761
  REGION 1..84: note = Description of Unknown:random_neg_ctrl neg_ctrl sequence

SEQ ID NO: 45797 - protein, 51 aa, unidentified; identical to SEQ ID NO: 13762
  REGION 1..51: note = Description of Unknown:random_neg_ctrl neg_ctrl sequence

SEQ ID NO: 45798 - protein, 84 aa, unidentified; identical to SEQ ID NO: 13763
  REGION 1..84: note = Description of Unknown:random_neg_ctrl neg_ctrl sequence

SEQ ID NO: 45799 - protein, 40 aa, unidentified
  REGION 1..40: note = Description of Unknown:random_neg_ctrl neg_ctrl sequence
LVLKENKEAENFMKGQVVKDSPQQLWKVIRLPLFHLLRFL

SEQ ID NO: 45800 - protein, 84 aa, unidentified; identical to SEQ ID NO: 13765
  REGION 1..84: note = Description of Unknown:random_neg_ctrl neg_ctrl sequence

SEQ ID NO: 45801 - protein, 85 aa, unidentified; identical to SEQ ID NO: 13766
  REGION 1..85: note = Description of Unknown:random_neg_ctrl neg_ctrl sequence

SEQ ID NO: 45802 - protein, 85 aa, unidentified; identical to SEQ ID NO: 13767
  REGION 1..85: note = Description of Unknown:random_neg_ctrl neg_ctrl sequence

SEQ ID NO: 45803 - protein, 85 aa, unidentified; identical to SEQ ID NO: 13768
  REGION 1..85: note = Description of Unknown:random_neg_ctrl neg_ctrl sequence

SEQ ID NO: 45804 - protein, 85 aa, unidentified; identical to SEQ ID NO: 13769
  REGION 1..85: note = Description of Unknown:random_neg_ctrl neg_ctrl sequence

SEQ ID NO: 45805 - protein, 85 aa, unidentified; identical to SEQ ID NO: 13770
  REGION 1..85: note = Description of Unknown:random_neg_ctrl neg_ctrl sequence

SEQ ID NO: 45806 - protein, 85 aa, unidentified; identical to SEQ ID NO: 13771
  REGION 1..85: note = Description of Unknown:random_neg_ctrl neg_ctrl sequence

SEQ ID NO: 45807 - protein, 85 aa, unidentified; identical to SEQ ID NO: 13772
  REGION 1..85: note = Description of Unknown:random_neg_ctrl neg_ctrl sequence

SEQ ID NO: 45808 - protein, 85 aa, unidentified; identical to SEQ ID NO: 13773
  REGION 1..85: note = Description of Unknown:random_neg_ctrl neg_ctrl sequence

SEQ ID NO: 45809 - protein, 85 aa, unidentified; identical to SEQ ID NO: 13774
  REGION 1..85: note = Description of Unknown:random_neg_ctrl neg_ctrl sequence

SEQ ID NO: 45810 - protein, 85 aa, unidentified; identical to SEQ ID NO: 13775
  REGION 1..85: note = Description of Unknown:random_neg_ctrl neg_ctrl sequence

SEQ ID NO: 45811 - protein, 85 aa, unidentified; identical to SEQ ID NO: 13776
  REGION 1..85: note = Description of Unknown:random_neg_ctrl neg_ctrl sequence

SEQ ID NO: 45812 - protein, 85 aa, unidentified; identical to SEQ ID NO: 13777
  REGION 1..85: note = Description of Unknown:random_neg_ctrl neg_ctrl sequence

SEQ ID NO: 45813 - protein, 84 aa, unidentified; identical to SEQ ID NO: 13778
  REGION 1..84: note = Description of Unknown:random_neg_ctrl neg_ctrl sequence

SEQ ID NO: 45814 - protein, 85 aa, unidentified; identical to SEQ ID NO: 13779
  REGION 1..85: note = Description of Unknown:random_neg_ctrl neg_ctrl sequence

SEQ ID NO: 45815 - protein, 85 aa, unidentified; identical to SEQ ID NO: 13780
  REGION 1..85: note = Description of Unknown:random_neg_ctrl neg_ctrl sequence

SEQ ID NO: 45816 - protein, 85 aa, unidentified; identical to SEQ ID NO: 13781
  REGION 1..85: note = Description of Unknown:random_neg_ctrl neg_ctrl sequence

SEQ ID NO: 45817 - protein, 85 aa, unidentified; identical to SEQ ID NO: 13782
  REGION 1..85: note = Description of Unknown:random_neg_ctrl neg_ctrl sequence

SEQ ID NO: 45818 - protein, 85 aa, unidentified; identical to SEQ ID NO: 13783
  REGION 1..85: note = Description of Unknown:random_neg_ctrl neg_ctrl sequence

SEQ ID NO: 45819 - protein, 85 aa, unidentified; identical to SEQ ID NO: 13784
  REGION 1..85: note = Description of Unknown:random_neg_ctrl neg_ctrl sequence

SEQ ID NO: 45820 - protein, 85 aa, unidentified; identical to SEQ ID NO: 13785
  REGION 1..85: note = Description of Unknown:random_neg_ctrl neg_ctrl sequence

SEQ ID NO: 45821 - protein, 85 aa, unidentified; identical to SEQ ID NO: 13786
  REGION 1..85: note = Description of Unknown:random_neg_ctrl neg_ctrl sequence

SEQ ID NO: 45822 - protein, 85 aa, unidentified; identical to SEQ ID NO: 13787
  REGION 1..85: note = Description of Unknown:random_neg_ctrl neg_ctrl sequence

SEQ ID NO: 45823 - protein, 85 aa, unidentified; identical to SEQ ID NO: 13788
  REGION 1..85: note = Description of Unknown:random_neg_ctrl neg_ctrl sequence

SEQ ID NO: 45824 - protein, 85 aa, unidentified; identical to SEQ ID NO: 13789
  REGION 1..85: note = Description of Unknown:random_neg_ctrl neg_ctrl sequence

SEQ ID NO: 45825 - protein, 85 aa, unidentified; identical to SEQ ID NO: 13790
  REGION 1..85: note = Description of Unknown:random_neg_ctrl neg_ctrl sequence

SEQ ID NO: 45826 - protein, 85 aa, unidentified; identical to SEQ ID NO: 13791
  REGION 1..85: note = Description of Unknown:random_neg_ctrl neg_ctrl sequence

SEQ ID NO: 45827 - protein, 85 aa, unidentified; identical to SEQ ID NO: 13792
  REGION 1..85: note = Description of Unknown:random_neg_ctrl neg_ctrl sequence

SEQ ID NO: 45828 - protein, 85 aa, unidentified; identical to SEQ ID NO: 13793
  REGION 1..85: note = Description of Unknown:random_neg_ctrl neg_ctrl sequence

SEQ ID NO: 45829 - protein, 85 aa, unidentified; identical to SEQ ID NO: 13794
  REGION 1..85: note = Description of Unknown:random_neg_ctrl neg_ctrl sequence

SEQ ID NO: 45830 - protein, 85 aa, unidentified; identical to SEQ ID NO: 13795
  REGION 1..85: note = Description of Unknown:random_neg_ctrl neg_ctrl sequence

SEQ ID NO: 45831 - protein, 85 aa, unidentified; identical to SEQ ID NO: 13796
  REGION 1..85: note = Description of Unknown:random_neg_ctrl neg_ctrl sequence

SEQ ID NO: 45832 - protein, 75 aa, unidentified; identical to SEQ ID NO: 13797
  REGION 1..75: note = Description of Unknown:random_neg_ctrl neg_ctrl sequence

SEQ ID NO: 45833 - protein, 84 aa, unidentified; identical to SEQ ID NO: 13798
  REGION 1..84: note = Description of Unknown:random_neg_ctrl neg_ctrl sequence

SEQ ID NO: 45834 - protein, 85 aa, unidentified; identical to SEQ ID NO: 13799
  REGION 1..85: note = Description of Unknown:random_neg_ctrl neg_ctrl sequence

SEQ ID NO: 45835 - protein, 85 aa, unidentified; identical to SEQ ID NO: 13800
  REGION 1..85: note = Description of Unknown:random_neg_ctrl neg_ctrl sequence

SEQ ID NO: 45836 - protein, 85 aa, unidentified; identical to SEQ ID NO: 13801
  REGION 1..85: note = Description of Unknown:random_neg_ctrl neg_ctrl sequence

SEQ ID NO: 45837 - protein, 85 aa, unidentified; identical to SEQ ID NO: 13802
  REGION 1..85: note = Description of Unknown:random_neg_ctrl neg_ctrl sequence

SEQ ID NO: 45838 - protein, 85 aa, unidentified; identical to SEQ ID NO: 13803
  REGION 1..85: note = Description of Unknown:random_neg_ctrl neg_ctrl sequence

SEQ ID NO: 45839 - protein, 85 aa, unidentified; identical to SEQ ID NO: 13804
  REGION 1..85: note = Description of Unknown:random_neg_ctrl neg_ctrl sequence

SEQ ID NO: 45840 - protein, 85 aa, unidentified; identical to SEQ ID NO: 13805
  REGION 1..85: note = Description of Unknown:random_neg_ctrl neg_ctrl sequence

SEQ ID NO: 45841 - protein, 84 aa, unidentified; identical to SEQ ID NO: 13806
  REGION 1..84: note = Description of Unknown:random_neg_ctrl neg_ctrl sequence

SEQ ID NO: 45842 - protein, 85 aa, unidentified; identical to SEQ ID NO: 13807
  REGION 1..85: note = Description of Unknown:random_neg_ctrl neg_ctrl sequence

SEQ ID NO: 45843 - protein, 85 aa, unidentified; identical to SEQ ID NO: 13808
  REGION 1..85: note = Description of Unknown:random_neg_ctrl neg_ctrl sequence

SEQ ID NO: 45844 - protein, 85 aa, unidentified; identical to SEQ ID NO: 13809
  REGION 1..85: note = Description of Unknown:random_neg_ctrl neg_ctrl sequence

SEQ ID NO: 45845 - protein, 85 aa, unidentified; identical to SEQ ID NO: 13810
  REGION 1..85: note = Description of Unknown:random_neg_ctrl neg_ctrl sequence

SEQ ID NO: 45846 - protein, 85 aa, unidentified; identical to SEQ ID NO: 13811
  REGION 1..85: note = Description of Unknown:random_neg_ctrl neg_ctrl sequence

SEQ ID NO: 45847 - protein, 85 aa, unidentified; identical to SEQ ID NO: 13812
  REGION 1..85: note = Description of Unknown:random_neg_ctrl neg_ctrl sequence

SEQ ID NO: 45848 - protein, 85 aa, unidentified; identical to SEQ ID NO: 13813
  REGION 1..85: note = Description of Unknown:random_neg_ctrl neg_ctrl sequence

SEQ ID NO: 45849 - protein, 50 aa, unidentified; identical to SEQ ID NO: 13814
  REGION 1..50: note = Description of Unknown:random_neg_ctrl neg_ctrl sequence

SEQ ID NO: 45850 - protein, 85 aa, unidentified
  REGION 1..85: note = Description of Unknown:random_neg_ctrl neg_ctrl sequence
LAPEETALSPSIQDPTEMLSGKSLAVHKPIHGASKETTHQQEPGIEDKFIGGASTKVELCWFLVQVLEWWRLSFLFHDQDKSIGN

SEQ ID NO: 45851 - protein, 85 aa, unidentified; identical to SEQ ID NO: 13816
  REGION 1..85: note = Description of Unknown:random_neg_ctrl neg_ctrl sequence

SEQ ID NO: 45852 - protein, 84 aa, unidentified; identical to SEQ ID NO: 13817
  REGION 1..84: note = Description of Unknown:random_neg_ctrl neg_ctrl sequence

SEQ ID NO: 45853 - protein, 85 aa, unidentified; identical to SEQ ID NO: 13818
  REGION 1..85: note = Description of Unknown:random_neg_ctrl neg_ctrl sequence

SEQ ID NO: 45854 - protein, 85 aa, unidentified
  REGION 1..85: note = Description of Unknown:random_neg_ctrl neg_ctrl sequence
LVEEYGHGNDTLGHHVPSASQSVQTEGSFELKQHKSKAMAYLSNCHEREKLSETRSGETSLFTVPKDSQGSEVPKLRDQGKSYLL

SEQ ID NO: 45855 - protein, 69 aa, unidentified; identical to SEQ ID NO: 13820
  REGION 1..69: note = Description of Unknown:random_neg_ctrl neg_ctrl sequence

SEQ ID NO: 45856 - protein, 85 aa, unidentified; identical to SEQ ID NO: 13821
  REGION 1..85: note = Description of Unknown:random_neg_ctrl neg_ctrl sequence

SEQ ID NO: 45857 - protein, 85 aa, unidentified; identical to SEQ ID NO: 13822
  REGION 1..85: note = Description of Unknown:random_neg_ctrl neg_ctrl sequence

SEQ ID NO: 45858 - protein, 85 aa, unidentified; identical to SEQ ID NO: 13823
  REGION 1..85: note = Description of Unknown:random_neg_ctrl neg_ctrl sequence

SEQ ID NO: 45859 - protein, 85 aa, unidentified; identical to SEQ ID NO: 13824
  REGION 1..85: note = Description of Unknown:random_neg_ctrl neg_ctrl sequence

SEQ ID NO: 45860 - protein, 85 aa, unidentified; identical to SEQ ID NO: 13825
  REGION 1..85: note = Description of Unknown:random_neg_ctrl neg_ctrl sequence

SEQ ID NO: 45861 - protein, 85 aa, unidentified; identical to SEQ ID NO: 13826
  REGION 1..85: note = Description of Unknown:random_neg_ctrl neg_ctrl sequence

SEQ ID NO: 45862 - protein, 85 aa, unidentified; identical to SEQ ID NO: 13827
  REGION 1..85: note = Description of Unknown:random_neg_ctrl neg_ctrl sequence

SEQ ID NO: 45863 - protein, 85 aa, unidentified; identical to SEQ ID NO: 13828
  REGION 1..85: note = Description of Unknown:random_neg_ctrl neg_ctrl sequence

SEQ ID NO: 45864 - protein, 85 aa, unidentified; identical to SEQ ID NO: 13829
  REGION 1..85: note = Description of Unknown:random_neg_ctrl neg_ctrl sequence

SEQ ID NO: 45865 - protein, 85 aa, unidentified; identical to SEQ ID NO: 13830
  REGION 1..85: note = Description of Unknown:random_neg_ctrl neg_ctrl sequence

SEQ ID NO: 45866 - protein, 85 aa, unidentified; identical to SEQ ID NO: 13831
  REGION 1..85: note = Description of Unknown:random_neg_ctrl neg_ctrl sequence

SEQ ID NO: 45867 - protein, 85 aa, unidentified; identical to SEQ ID NO: 13832
  REGION 1..85: note = Description of Unknown:random_neg_ctrl neg_ctrl sequence

SEQ ID NO: 45868 - protein, 17 aa, unidentified
  REGION 1..17: note = Description of Unknown:random_neg_ctrl neg_ctrl sequence
EPQLIEAGISLYQGCMA

SEQ ID NO: 45869 - protein, 84 aa, unidentified; identical to SEQ ID NO: 13834
  REGION 1..84: note = Description of Unknown:random_neg_ctrl neg_ctrl sequence

SEQ ID NO: 45870 - protein, 85 aa, unidentified; identical to SEQ ID NO: 13835
  REGION 1..85: note = Description of Unknown:random_neg_ctrl neg_ctrl sequence

SEQ ID NO: 45871 - protein, 85 aa, unidentified; identical to SEQ ID NO: 13836
  REGION 1..85: note = Description of Unknown:random_neg_ctrl neg_ctrl sequence

SEQ ID NO: 45872 - protein, 85 aa, unidentified; identical to SEQ ID NO: 13837
  REGION 1..85: note = Description of Unknown:random_neg_ctrl neg_ctrl sequence

SEQ ID NO: 45873 - protein, 85 aa, unidentified; identical to SEQ ID NO: 13838
  REGION 1..85: note = Description of Unknown:random_neg_ctrl neg_ctrl sequence

SEQ ID NO: 45874 - protein, 84 aa, unidentified; identical to SEQ ID NO: 13839
  REGION 1..84: note = Description of Unknown:random_neg_ctrl neg_ctrl sequence

SEQ ID NO: 45875 - protein, 85 aa, unidentified; identical to SEQ ID NO: 13840
  REGION 1..85: note = Description of Unknown:random_neg_ctrl neg_ctrl sequence

SEQ ID NO: 45876 - protein, 85 aa, unidentified; identical to SEQ ID NO: 13841
  REGION 1..85: note = Description of Unknown:random_neg_ctrl neg_ctrl sequence

SEQ ID NO: 45877 - protein, 6 aa, unidentified
  REGION 1..6: note = Description of Unknown:random_neg_ctrl neg_ctrl sequence
TGKFQG

SEQ ID NO: 45878 - protein, 72 aa, unidentified; identical to SEQ ID NO: 13843
  REGION 1..72: note = Description of Unknown:random_neg_ctrl neg_ctrl sequence

SEQ ID NO: 45879 - protein, 85 aa, unidentified; identical to SEQ ID NO: 13844
  REGION 1..85: note = Description of Unknown:random_neg_ctrl neg_ctrl sequence

SEQ ID NO: 45880 - protein, 85 aa, unidentified; identical to SEQ ID NO: 13845
  REGION 1..85: note = Description of Unknown:random_neg_ctrl neg_ctrl sequence

SEQ ID NO: 45881 - protein, 85 aa, unidentified; identical to SEQ ID NO: 13846
  REGION 1..85: note = Description of Unknown:random_neg_ctrl neg_ctrl sequence

SEQ ID NO: 45882 - protein, 85 aa, unidentified; identical to SEQ ID NO: 13847
  REGION 1..85: note = Description of Unknown:random_neg_ctrl neg_ctrl sequence

SEQ ID NO: 45883 - protein, 85 aa, unidentified; identical to SEQ ID NO: 13848
  REGION 1..85: note = Description of Unknown:random_neg_ctrl neg_ctrl sequence

SEQ ID NO: 45884 - protein, 85 aa, unidentified; identical to SEQ ID NO: 13849
  REGION 1..85: note = Description of Unknown:random_neg_ctrl neg_ctrl sequence

SEQ ID NO: 45885 - protein, 85 aa, unidentified; identical to SEQ ID NO: 13850
  REGION 1..85: note = Description of Unknown:random_neg_ctrl neg_ctrl sequence

SEQ ID NO: 45886 - protein, 85 aa, unidentified; identical to SEQ ID NO: 13851
  REGION 1..85: note = Description of Unknown:random_neg_ctrl neg_ctrl sequence

SEQ ID NO: 45887 - protein, 85 aa, unidentified; identical to SEQ ID NO: 13852
  REGION 1..85: note = Description of Unknown:random_neg_ctrl neg_ctrl sequence

SEQ ID NO: 45888 - protein, 85 aa, unidentified; identical to SEQ ID NO: 13853
  REGION 1..85: note = Description of Unknown:random_neg_ctrl neg_ctrl sequence

SEQ ID NO: 45889 - protein, 84 aa, unidentified; identical to SEQ ID NO: 13854
  REGION 1..84: note = Description of Unknown:random_neg_ctrl neg_ctrl sequence

SEQ ID NO: 45890 - protein, 85 aa, unidentified; identical to SEQ ID NO: 13855
  REGION 1..85: note = Description of Unknown:random_neg_ctrl neg_ctrl sequence

SEQ ID NO: 45891 - protein, 84 aa, unidentified; identical to SEQ ID NO: 13856
  REGION 1..84: note = Description of Unknown:random_neg_ctrl neg_ctrl sequence

SEQ ID NO: 45892 - protein, 85 aa, unidentified; identical to SEQ ID NO: 13857
  REGION 1..85: note = Description of Unknown:random_neg_ctrl neg_ctrl sequence

SEQ ID NO: 45893 - protein, 85 aa, unidentified; identical to SEQ ID NO: 13858
  REGION 1..85: note = Description of Unknown:random_neg_ctrl neg_ctrl sequence

SEQ ID NO: 45894 - protein, 85 aa, unidentified; identical to SEQ ID NO: 13859
  REGION 1..85: note = Description of Unknown:random_neg_ctrl neg_ctrl sequence

SEQ ID NO: 45895 - protein, 85 aa, unidentified; identical to SEQ ID NO: 13860
  REGION 1..85: note = Description of Unknown:random_neg_ctrl neg_ctrl sequence

SEQ ID NO: 45896 - protein, 26 aa, unidentified
  REGION 1..26: note = Description of Unknown:random_neg_ctrl neg_ctrl sequence
IGFCSATVSLFNALGVHHPQSLKNKF

SEQ ID NO: 45897 - protein, 85 aa, unidentified; identical to SEQ ID NO: 13862
  REGION 1..85: note = Description of Unknown:random_neg_ctrl neg_ctrl sequence

SEQ ID NO: 45898 - protein, 85 aa, unidentified; identical to SEQ ID NO: 13863
  REGION 1..85: note = Description of Unknown:random_neg_ctrl neg_ctrl sequence

SEQ ID NO: 45899 - protein, 85 aa, unidentified; identical to SEQ ID NO: 13864
  REGION 1..85: note = Description of Unknown:random_neg_ctrl neg_ctrl sequence

SEQ ID NO: 45900 - protein, 85 aa, unidentified; identical to SEQ ID NO: 13865
  REGION 1..85: note = Description of Unknown:random_neg_ctrl neg_ctrl sequence

SEQ ID NO: 45901 - protein, 85 aa, unidentified; identical to SEQ ID NO: 13866
  REGION 1..85: note = Description of Unknown:random_neg_ctrl neg_ctrl sequence

SEQ ID NO: 45902 - protein, 85 aa, unidentified; identical to SEQ ID NO: 13867
  REGION 1..85: note = Description of Unknown:random_neg_ctrl neg_ctrl sequence

SEQ ID NO: 45903 - protein, 63 aa, unidentified; identical to SEQ ID NO: 13868
  REGION 1..63: note = Description of Unknown:random_neg_ctrl neg_ctrl sequence

SEQ ID NO: 45904 - protein, 85 aa, unidentified; identical to SEQ ID NO: 13869
  REGION 1..85: note = Description of Unknown:random_neg_ctrl neg_ctrl sequence

SEQ ID NO: 45905 - protein, 85 aa, unidentified; identical to SEQ ID NO: 13870
  REGION 1..85: note = Description of Unknown:random_neg_ctrl neg_ctrl sequence

SEQ ID NO: 45906 - protein, 85 aa, unidentified; identical to SEQ ID NO: 13871
  REGION 1..85: note = Description of Unknown:random_neg_ctrl neg_ctrl sequence

SEQ ID NO: 45907 - protein, 85 aa, unidentified; identical to SEQ ID NO: 13872
  REGION 1..85: note = Description of Unknown:random_neg_ctrl neg_ctrl sequence

SEQ ID NO: 45908 - protein, 85 aa, unidentified; identical to SEQ ID NO: 13873
  REGION 1..85: note = Description of Unknown:random_neg_ctrl neg_ctrl sequence

SEQ ID NO: 45909 - protein, 85 aa, unidentified; identical to SEQ ID NO: 13874
  REGION 1..85: note = Description of Unknown:random_neg_ctrl neg_ctrl sequence

SEQ ID NO: 45910 - protein, 85 aa, unidentified; identical to SEQ ID NO: 13875
  REGION 1..85: note = Description of Unknown:random_neg_ctrl neg_ctrl sequence

SEQ ID NO: 45911 - protein, 85 aa, unidentified; identical to SEQ ID NO: 13876
  REGION 1..85: note = Description of Unknown:random_neg_ctrl neg_ctrl sequence

SEQ ID NO: 45912 - protein, 26 aa, unidentified
  REGION 1..26: note = Description of Unknown:random_neg_ctrl neg_ctrl sequence
GPKLELWPQISYSEKQITHEPPHDPI

SEQ ID NO: 45913 - protein, 85 aa, unidentified; identical to SEQ ID NO: 13878
  REGION 1..85: note = Description of Unknown:random_neg_ctrl neg_ctrl sequence

SEQ ID NO: 45914 - protein, 85 aa, unidentified; identical to SEQ ID NO: 13879
  REGION 1..85: note = Description of Unknown:random_neg_ctrl neg_ctrl sequence

SEQ ID NO: 45915 - protein, 85 aa, unidentified; identical to SEQ ID NO: 13880
  REGION 1..85: note = Description of Unknown:random_neg_ctrl neg_ctrl sequence

SEQ ID NO: 45916 - protein, 85 aa, unidentified; identical to SEQ ID NO: 13881
  REGION 1..85: note = Description of Unknown:random_neg_ctrl neg_ctrl sequence

SEQ ID NO: 45917 - protein, 85 aa, unidentified; identical to SEQ ID NO: 13882
  REGION 1..85: note = Description of Unknown:random_neg_ctrl neg_ctrl sequence

SEQ ID NO: 45918 - protein, 85 aa, unidentified; identical to SEQ ID NO: 13883
  REGION 1..85: note = Description of Unknown:random_neg_ctrl neg_ctrl sequence

SEQ ID NO: 45919 - protein, 85 aa, unidentified; identical to SEQ ID NO: 13884
  REGION 1..85: note = Description of Unknown:random_neg_ctrl neg_ctrl sequence

SEQ ID NO: 45920 - protein, 85 aa, unidentified; identical to SEQ ID NO: 13885
  REGION 1..85: note = Description of Unknown:random_neg_ctrl neg_ctrl sequence

SEQ ID NO: 45921 - protein, 85 aa, unidentified; identical to SEQ ID NO: 13886
  REGION 1..85: note = Description of Unknown:random_neg_ctrl neg_ctrl sequence

SEQ ID NO: 45922 - protein, 12 aa, unidentified
  REGION 1..12: note = Description of Unknown:random_neg_ctrl neg_ctrl sequence
YQVEPYDSHNHQ

SEQ ID NO: 45923 - protein, 85 aa, unidentified
  REGION 1..85: note = Description of Unknown:random_neg_ctrl neg_ctrl sequence
LESEPHLERAAVLLSTRERWDFHPAAMLSFLALFLFTSLTYTKYHCSRPISMNGLTFPNTPADRSIKSSEQTPLCLALRPAIYIL

SEQ ID NO: 45924 - protein, 85 aa, unidentified
  REGION 1..85: note = Description of Unknown:random_neg_ctrl neg_ctrl sequence
LYGQCLTREVNWRGEQSRLVPARVACPLMSPRSQEPKDTDKKVPYDILPEDAQSGISRDLPHIWAMLEKPKDVISLEFDMPEPML

SEQ ID NO: 45925 - protein, 85 aa, unidentified; identical to SEQ ID NO: 13890
  REGION 1..85: note = Description of Unknown:random_neg_ctrl neg_ctrl sequence

SEQ ID NO: 45926 - protein, 85 aa, unidentified; identical to SEQ ID NO: 13891
  REGION 1..85: note = Description of Unknown:random_neg_ctrl neg_ctrl sequence

SEQ ID NO: 45927 - protein, 85 aa, unidentified; identical to SEQ ID NO: 13892
  REGION 1..85: note = Description of Unknown:random_neg_ctrl neg_ctrl sequence

SEQ ID NO: 45928 - protein, 7 aa, unidentified
  REGION 1..7: note = Description of Unknown:random_neg_ctrl neg_ctrl sequence
ARTLVLL

SEQ ID NO: 45929 - protein, 85 aa, unidentified; identical to SEQ ID NO: 13894
  REGION 1..85: note = Description of Unknown:random_neg_ctrl neg_ctrl sequence

SEQ ID NO: 45930 - protein, 85 aa, unidentified; identical to SEQ ID NO: 13895
  REGION 1..85: note = Description of Unknown:random_neg_ctrl neg_ctrl sequence

SEQ ID NO: 45931 - protein, 85 aa, unidentified; identical to SEQ ID NO: 13896
  REGION 1..85: note = Description of Unknown:random_neg_ctrl neg_ctrl sequence

SEQ ID NO: 45932 - protein, 85 aa, unidentified; identical to SEQ ID NO: 13897
  REGION 1..85: note = Description of Unknown:random_neg_ctrl neg_ctrl sequence

SEQ ID NO: 45933 - protein, 85 aa, unidentified; identical to SEQ ID NO: 13898
  REGION 1..85: note = Description of Unknown:random_neg_ctrl neg_ctrl sequence

SEQ ID NO: 45934 - protein, 85 aa, unidentified; identical to SEQ ID NO: 13899
  REGION 1..85: note = Description of Unknown:random_neg_ctrl neg_ctrl sequence

SEQ ID NO: 45935 - protein, 85 aa, unidentified; identical to SEQ ID NO: 13900
  REGION 1..85: note = Description of Unknown:random_neg_ctrl neg_ctrl sequence

SEQ ID NO: 45936 - protein, 85 aa, unidentified; identical to SEQ ID NO: 13901
  REGION 1..85: note = Description of Unknown:random_neg_ctrl neg_ctrl sequence

SEQ ID NO: 45937 - protein, 85 aa, unidentified; identical to SEQ ID NO: 13902
  REGION 1..85: note = Description of Unknown:random_neg_ctrl neg_ctrl sequence

SEQ ID NO: 45938 - protein, 85 aa, unidentified; identical to SEQ ID NO: 13903
  REGION 1..85: note = Description of Unknown:random_neg_ctrl neg_ctrl sequence

SEQ ID NO: 45939 - protein, 85 aa, unidentified; identical to SEQ ID NO: 13904
  REGION 1..85: note = Description of Unknown:random_neg_ctrl neg_ctrl sequence

SEQ ID NO: 45940 - protein, 85 aa, unidentified; identical to SEQ ID NO: 13905
  REGION 1..85: note = Description of Unknown:random_neg_ctrl neg_ctrl sequence

SEQ ID NO: 45941 - protein, 85 aa, unidentified; identical to SEQ ID NO: 13906
  REGION 1..85: note = Description of Unknown:random_neg_ctrl neg_ctrl sequence

SEQ ID NO: 45942 - protein, 85 aa, unidentified; identical to SEQ ID NO: 13907
  REGION 1..85: note = Description of Unknown:random_neg_ctrl neg_ctrl sequence

SEQ ID NO: 45943 - protein, 85 aa, unidentified; identical to SEQ ID NO: 13908
  REGION 1..85: note = Description of Unknown:random_neg_ctrl neg_ctrl sequence

SEQ ID NO: 45944 - protein, 85 aa, unidentified; identical to SEQ ID NO: 13909
  REGION 1..85: note = Description of Unknown:random_neg_ctrl neg_ctrl sequence

SEQ ID NO: 45945 - protein, 85 aa, unidentified; identical to SEQ ID NO: 13910
  REGION 1..85: note = Description of Unknown:random_neg_ctrl neg_ctrl sequence

SEQ ID NO: 45946 - protein, 85 aa, unidentified; identical to SEQ ID NO: 13911
  REGION 1..85: note = Description of Unknown:random_neg_ctrl neg_ctrl sequence

SEQ ID NO: 45947 - protein, 85 aa, unidentified; identical to SEQ ID NO: 13912
  REGION 1..85: note = Description of Unknown:random_neg_ctrl neg_ctrl sequence

SEQ ID NO: 45948 - protein, 85 aa, unidentified; identical to SEQ ID NO: 13913
  REGION 1..85: note = Description of Unknown:random_neg_ctrl neg_ctrl sequence

SEQ ID NO: 45949 - protein, 85 aa, unidentified; identical to SEQ ID NO: 13914
  REGION 1..85: note = Description of Unknown:random_neg_ctrl neg_ctrl sequence

SEQ ID NO: 45950 - protein, 85 aa, unidentified; identical to SEQ ID NO: 13915
  REGION 1..85: note = Description of Unknown:random_neg_ctrl neg_ctrl sequence

SEQ ID NO: 45951 - protein, 85 aa, unidentified; identical to SEQ ID NO: 13916
  REGION 1..85: note = Description of Unknown:random_neg_ctrl neg_ctrl sequence

SEQ ID NO: 45952 - protein, 85 aa, unidentified; identical to SEQ ID NO: 13917
  REGION 1..85: note = Description of Unknown:random_neg_ctrl neg_ctrl sequence

SEQ ID NO: 45953 - protein, 85 aa, unidentified; identical to SEQ ID NO: 13918
  REGION 1..85: note = Description of Unknown:random_neg_ctrl neg_ctrl sequence

SEQ ID NO: 45954 - protein, 85 aa, unidentified; identical to SEQ ID NO: 13919
  REGION 1..85: note = Description of Unknown:random_neg_ctrl neg_ctrl sequence

SEQ ID NO: 45955 - protein, 85 aa, unidentified; identical to SEQ ID NO: 13920
  REGION 1..85: note = Description of Unknown:random_neg_ctrl neg_ctrl sequence

SEQ ID NO: 45956 - protein, 85 aa, unidentified; identical to SEQ ID NO: 13921
  REGION 1..85: note = Description of Unknown:random_neg_ctrl neg_ctrl sequence

SEQ ID NO: 45957 - protein, 85 aa, unidentified
  REGION 1..85: note = Description of Unknown:random_neg_ctrl neg_ctrl sequence
LHAAPAVSTDAPAEVNIDANTMTDKRCSSPRDEGKARDLPCLGPALFWKIAGVRKASYSNPGLIIAVWTPFEQRRILLWEIRLIQ

SEQ ID NO: 45958 - protein, 85 aa, unidentified; identical to SEQ ID NO: 13923
  REGION 1..85: note = Description of Unknown:random_neg_ctrl neg_ctrl sequence

SEQ ID NO: 45959 - protein, 85 aa, unidentified; identical to SEQ ID NO: 13924
  REGION 1..85: note = Description of Unknown:random_neg_ctrl neg_ctrl sequence

SEQ ID NO: 45960 - protein, 85 aa, unidentified; identical to SEQ ID NO: 13925
  REGION 1..85: note = Description of Unknown:random_neg_ctrl neg_ctrl sequence

SEQ ID NO: 45961 - protein, 85 aa, unidentified; identical to SEQ ID NO: 13926
  REGION 1..85: note = Description of Unknown:random_neg_ctrl neg_ctrl sequence

SEQ ID NO: 45962 - protein, 85 aa, unidentified; identical to SEQ ID NO: 13927
  REGION 1..85: note = Description of Unknown:random_neg_ctrl neg_ctrl sequence

SEQ ID NO: 45963 - protein, 85 aa, unidentified
  REGION 1..85: note = Description of Unknown:random_neg_ctrl neg_ctrl sequence
LSKKPMIPRPYLTDKHTDETDAKSLYAAMANECPLIPPINQCKRLKEALLGFRKMFTPAQQELCADETQDHVTSILDGLKGYKHS

SEQ ID NO: 45964 - protein, 85 aa, unidentified; identical to SEQ ID NO: 13929
  REGION 1..85: note = Description of Unknown:random_neg_ctrl neg_ctrl sequence

SEQ ID NO: 45965 - protein, 85 aa, unidentified; identical to SEQ ID NO: 13930
  REGION 1..85: note = Description of Unknown:random_neg_ctrl neg_ctrl sequence

SEQ ID NO: 45966 - protein, 85 aa, unidentified; identical to SEQ ID NO: 13931
  REGION 1..85: note = Description of Unknown:random_neg_ctrl neg_ctrl sequence

SEQ ID NO: 45967 - protein, 85 aa, unidentified; identical to SEQ ID NO: 13932
  REGION 1..85: note = Description of Unknown:random_neg_ctrl neg_ctrl sequence

SEQ ID NO: 45968 - protein, 85 aa, unidentified; identical to SEQ ID NO: 13933
  REGION 1..85: note = Description of Unknown:random_neg_ctrl neg_ctrl sequence

SEQ ID NO: 45969 - protein, 85 aa, unidentified; identical to SEQ ID NO: 13934
  REGION 1..85: note = Description of Unknown:random_neg_ctrl neg_ctrl sequence

SEQ ID NO: 45970 - protein, 85 aa, unidentified; identical to SEQ ID NO: 13935
  REGION 1..85: note = Description of Unknown:random_neg_ctrl neg_ctrl sequence

SEQ ID NO: 45971 - protein, 85 aa, unidentified; identical to SEQ ID NO: 13936
  REGION 1..85: note = Description of Unknown:random_neg_ctrl neg_ctrl sequence

SEQ ID NO: 45972 - protein, 61 aa, unidentified; identical to SEQ ID NO: 13937
  REGION 1..61: note = Description of Unknown:random_neg_ctrl neg_ctrl sequence

SEQ ID NO: 45973 - protein, 85 aa, unidentified; identical to SEQ ID NO: 13938
  REGION 1..85: note = Description of Unknown:random_neg_ctrl neg_ctrl sequence

SEQ ID NO: 45974 - protein, 85 aa, unidentified; identical to SEQ ID NO: 13939
  REGION 1..85: note = Description of Unknown:random_neg_ctrl neg_ctrl sequence

SEQ ID NO: 45975 - protein, 85 aa, unidentified; identical to SEQ ID NO: 13940
  REGION 1..85: note = Description of Unknown:random_neg_ctrl neg_ctrl sequence

SEQ ID NO: 45976 - protein, 85 aa, unidentified; identical to SEQ ID NO: 13941
  REGION 1..85: note = Description of Unknown:random_neg_ctrl neg_ctrl sequence

SEQ ID NO: 45977 - protein, 85 aa, unidentified; identical to SEQ ID NO: 13942
  REGION 1..85: note = Description of Unknown:random_neg_ctrl neg_ctrl sequence

SEQ ID NO: 45978 - protein, 85 aa, unidentified; identical to SEQ ID NO: 13943
  REGION 1..85: note = Description of Unknown:random_neg_ctrl neg_ctrl sequence

SEQ ID NO: 45979 - protein, 85 aa, unidentified; identical to SEQ ID NO: 13944
  REGION 1..85: note = Description of Unknown:random_neg_ctrl neg_ctrl sequence

SEQ ID NO: 45980 - protein, 85 aa, unidentified; identical to SEQ ID NO: 13945
  REGION 1..85: note = Description of Unknown:random_neg_ctrl neg_ctrl sequence

SEQ ID NO: 45981 - protein, 83 aa, unidentified
  REGION 1..83: note = Description of Unknown:random_neg_ctrl neg_ctrl sequence
LIMMAYVEEKLRSWEEIAEPTLYLSSLEVLKDISVRSKLAKGESDPVAIRYNALLLLQSVQVIDECPREEKKDKNEYANELNM

SEQ ID NO: 45982 - protein, 85 aa, unidentified; identical to SEQ ID NO: 13947
  REGION 1..85: note = Description of Unknown:random_neg_ctrl neg_ctrl sequence

SEQ ID NO: 45983 - protein, 85 aa, unidentified; identical to SEQ ID NO: 13948
  REGION 1..85: note = Description of Unknown:random_neg_ctrl neg_ctrl sequence

SEQ ID NO: 45984 - protein, 85 aa, unidentified; identical to SEQ ID NO: 13949
  REGION 1..85: note = Description of Unknown:random_neg_ctrl neg_ctrl sequence

SEQ ID NO: 45985 - protein, 7 aa, unidentified
  REGION 1..7: note = Description of Unknown:random_neg_ctrl neg_ctrl sequence
APDSTLG

SEQ ID NO: 45986 - protein, 85 aa, unidentified; identical to SEQ ID NO: 13951
  REGION 1..85: note = Description of Unknown:random_neg_ctrl neg_ctrl sequence

SEQ ID NO: 45987 - protein, 84 aa, unidentified; identical to SEQ ID NO: 13952
  REGION 1..84: note = Description of Unknown:random_neg_ctrl neg_ctrl sequence

SEQ ID NO: 45988 - protein, 85 aa, unidentified; identical to SEQ ID NO: 13953
  REGION 1..85: note = Description of Unknown:random_neg_ctrl neg_ctrl sequence

SEQ ID NO: 45989 - protein, 85 aa, unidentified; identical to SEQ ID NO: 13954
  REGION 1..85: note = Description of Unknown:random_neg_ctrl neg_ctrl sequence

SEQ ID NO: 45990 - protein, 85 aa, unidentified; identical to SEQ ID NO: 13955
  REGION 1..85: note = Description of Unknown:random_neg_ctrl neg_ctrl sequence

SEQ ID NO: 45991 - protein, 85 aa, unidentified; identical to SEQ ID NO: 13956
  REGION 1..85: note = Description of Unknown:random_neg_ctrl neg_ctrl sequence

SEQ ID NO: 45992 - protein, 85 aa, unidentified; identical to SEQ ID NO: 13957
  REGION 1..85: note = Description of Unknown:random_neg_ctrl neg_ctrl sequence

SEQ ID NO: 45993 - protein, 85 aa, unidentified; identical to SEQ ID NO: 13958
  REGION 1..85: note = Description of Unknown:random_neg_ctrl neg_ctrl sequence

SEQ ID NO: 45994 - protein, 85 aa, unidentified; identical to SEQ ID NO: 13959
  REGION 1..85: note = Description of Unknown:random_neg_ctrl neg_ctrl sequence

SEQ ID NO: 45995 - protein, 85 aa, unidentified; identical to SEQ ID NO: 13960
  REGION 1..85: note = Description of Unknown:random_neg_ctrl neg_ctrl sequence

SEQ ID NO: 45996 - protein, 53 aa, unidentified; identical to SEQ ID NO: 13961
  REGION 1..53: note = Description of Unknown:random_neg_ctrl neg_ctrl sequence

SEQ ID NO: 45997 - protein, 85 aa, unidentified; identical to SEQ ID NO: 13962
  REGION 1..85: note = Description of Unknown:random_neg_ctrl neg_ctrl sequence

SEQ ID NO: 45998 - protein, 85 aa, unidentified; identical to SEQ ID NO: 13963
  REGION 1..85: note = Description of Unknown:random_neg_ctrl neg_ctrl sequence

SEQ ID NO: 45999 - protein, 20 aa, unidentified
  REGION 1..20: note = Description of Unknown:random_neg_ctrl neg_ctrl sequence
DSHRASPRKLRQLLVVPLDE

SEQ ID NO: 46000 - protein, 85 aa, unidentified; identical to SEQ ID NO: 13965
  REGION 1..85: note = Description of Unknown:random_neg_ctrl neg_ctrl sequence

SEQ ID NO: 46001 - protein, 85 aa, unidentified; identical to SEQ ID NO: 13966
  REGION 1..85: note = Description of Unknown:random_neg_ctrl neg_ctrl sequence

SEQ ID NO: 46002 - protein, 85 aa, unidentified; identical to SEQ ID NO: 13967
  REGION 1..85: note = Description of Unknown:random_neg_ctrl neg_ctrl sequence

SEQ ID NO: 46003 - protein, 85 aa, unidentified; identical to SEQ ID NO: 13968
  REGION 1..85: note = Description of Unknown:random_neg_ctrl neg_ctrl sequence

SEQ ID NO: 46004 - protein, 85 aa, unidentified; identical to SEQ ID NO: 13969
  REGION 1..85: note = Description of Unknown:random_neg_ctrl neg_ctrl sequence

SEQ ID NO: 46005 - protein, 85 aa, unidentified; identical to SEQ ID NO: 13970
  REGION 1..85: note = Description of Unknown:random_neg_ctrl neg_ctrl sequence

SEQ ID NO: 46006 - protein, 25 aa, unidentified
  REGION 1..25: note = Description of Unknown:random_neg_ctrl neg_ctrl sequence
KGVSYSTVFETFIPVHPSAPYGHFG

SEQ ID NO: 46007 - protein, 85 aa, unidentified; identical to SEQ ID NO: 13972
  REGION 1..85: note = Description of Unknown:random_neg_ctrl neg_ctrl sequence

SEQ ID NO: 46008 - protein, 34 aa, unidentified
  REGION 1..34: note = Description of Unknown:random_neg_ctrl neg_ctrl sequence
LQSRTAQIKVFLWRSSLNEVESCLFKTARQPAKS

SEQ ID NO: 46009 - protein, 85 aa, unidentified; identical to SEQ ID NO: 13974
  REGION 1..85: note = Description of Unknown:random_neg_ctrl neg_ctrl sequence

SEQ ID NO: 46010 - protein, 85 aa, unidentified; identical to SEQ ID NO: 13975
  REGION 1..85: note = Description of Unknown:random_neg_ctrl neg_ctrl sequence

SEQ ID NO: 46011 - protein, 85 aa, unidentified; identical to SEQ ID NO: 13976
  REGION 1..85: note = Description of Unknown:random_neg_ctrl neg_ctrl sequence

SEQ ID NO: 46012 - protein, 85 aa, unidentified; identical to SEQ ID NO: 13977
  REGION 1..85: note = Description of Unknown:random_neg_ctrl neg_ctrl sequence

SEQ ID NO: 46013 - protein, 85 aa, unidentified; identical to SEQ ID NO: 13978
  REGION 1..85: note = Description of Unknown:random_neg_ctrl neg_ctrl sequence

SEQ ID NO: 46014 - protein, 84 aa, unidentified; identical to SEQ ID NO: 13979
  REGION 1..84: note = Description of Unknown:random_neg_ctrl neg_ctrl sequence

SEQ ID NO: 46015 - protein, 85 aa, unidentified; identical to SEQ ID NO: 13980
  REGION 1..85: note = Description of Unknown:random_neg_ctrl neg_ctrl sequence

SEQ ID NO: 46016 - protein, 85 aa, unidentified; identical to SEQ ID NO: 13981
  REGION 1..85: note = Description of Unknown:random_neg_ctrl neg_ctrl sequence

SEQ ID NO: 46017 - protein, 85 aa, unidentified; identical to SEQ ID NO: 13982
  REGION 1..85: note = Description of Unknown:random_neg_ctrl neg_ctrl sequence

SEQ ID NO: 46018 - protein, 85 aa, unidentified
  REGION 1..85: note = Description of Unknown:random_neg_ctrl neg_ctrl sequence
LIEEKEQRDLYCDEGSQPELAEDRQSLPEEKDLAHKRTIEKLQDPPLDLTRRFSPECTLIEAVVTAEMEPPQYDLMLALVGFFSP

SEQ ID NO: 46019 - protein, 85 aa, unidentified; identical to SEQ ID NO: 13984
  REGION 1..85: note = Description of Unknown:random_neg_ctrl neg_ctrl sequence

SEQ ID NO: 46020 - protein, 85 aa, unidentified; identical to SEQ ID NO: 13985
  REGION 1..85: note = Description of Unknown:random_neg_ctrl neg_ctrl sequence

SEQ ID NO: 46021 - protein, 38 aa, unidentified; identical to SEQ ID NO: 13986
  REGION 1..38: note = Description of Unknown:random_neg_ctrl neg_ctrl sequence

SEQ ID NO: 46022 - protein, 85 aa, unidentified; identical to SEQ ID NO: 13987
  REGION 1..85: note = Description of Unknown:random_neg_ctrl neg_ctrl sequence

SEQ ID NO: 46023 - protein, 85 aa, unidentified; identical to SEQ ID NO: 13988
  REGION 1..85: note = Description of Unknown:random_neg_ctrl neg_ctrl sequence

SEQ ID NO: 46024 - protein, 85 aa, unidentified; identical to SEQ ID NO: 13989
  REGION 1..85: note = Description of Unknown:random_neg_ctrl neg_ctrl sequence

SEQ ID NO: 46025 - protein, 85 aa, unidentified; identical to SEQ ID NO: 13990
  REGION 1..85: note = Description of Unknown:random_neg_ctrl neg_ctrl sequence

SEQ ID NO: 46026 - protein, 85 aa, unidentified; identical to SEQ ID NO: 13991
  REGION 1..85: note = Description of Unknown:random_neg_ctrl neg_ctrl sequence

SEQ ID NO: 46027 - protein, 85 aa, unidentified; identical to SEQ ID NO: 13992
  REGION 1..85: note = Description of Unknown:random_neg_ctrl neg_ctrl sequence

SEQ ID NO: 46028 - protein, 85 aa, unidentified; identical to SEQ ID NO: 13993
  REGION 1..85: note = Description of Unknown:random_neg_ctrl neg_ctrl sequence

SEQ ID NO: 46029 - protein, 85 aa, unidentified; identical to SEQ ID NO: 13994
  REGION 1..85: note = Description of Unknown:random_neg_ctrl neg_ctrl sequence

SEQ ID NO: 46030 - protein, 85 aa, unidentified; identical to SEQ ID NO: 13995
  REGION 1..85: note = Description of Unknown:random_neg_ctrl neg_ctrl sequence

SEQ ID NO: 46031 - protein, 84 aa, unidentified; identical to SEQ ID NO: 13996
  REGION 1..84: note = Description of Unknown:random_neg_ctrl neg_ctrl sequence

SEQ ID NO: 46032 - protein, 85 aa, unidentified; identical to SEQ ID NO: 13997
  REGION 1..85: note = Description of Unknown:random_neg_ctrl neg_ctrl sequence

SEQ ID NO: 46033 - protein, 85 aa, unidentified; identical to SEQ ID NO: 13998
  REGION 1..85: note = Description of Unknown:random_neg_ctrl neg_ctrl sequence

SEQ ID NO: 46034 - protein, 85 aa, unidentified; identical to SEQ ID NO: 13999
  REGION 1..85: note = Description of Unknown:random_neg_ctrl neg_ctrl sequence

SEQ ID NO: 46035 - protein, 85 aa, unidentified; identical to SEQ ID NO: 14000
  REGION 1..85: note = Description of Unknown:random_neg_ctrl neg_ctrl sequence

SEQ ID NO: 46036 - protein, 85 aa, unidentified; identical to SEQ ID NO: 14001
  REGION 1..85: note = Description of Unknown:random_neg_ctrl neg_ctrl sequence

SEQ ID NO: 46037 - protein, 84 aa, unidentified
  REGION 1..84: note = Description of Unknown:random_neg_ctrl neg_ctrl sequence
LPFQSVAARLDLRETDNPKSESELSGADLDLRKKKAAERESGRDIIYGASKEESDTEGIDACMPKLPLQPVSKNALQYPLASVV

SEQ ID NO: 46038 - protein, 85 aa, unidentified; identical to SEQ ID NO: 14003
  REGION 1..85: note = Description of Unknown:random_neg_ctrl neg_ctrl sequence

SEQ ID NO: 46039 - protein, 85 aa, unidentified; identical to SEQ ID NO: 14004
  REGION 1..85: note = Description of Unknown:random_neg_ctrl neg_ctrl sequence

SEQ ID NO: 46040 - protein, 55 aa, unidentified
  REGION 1..55: note = Description of Unknown:random_neg_ctrl neg_ctrl sequence
LLTINSKEEQTELPKKSEQNEKHSLREQRLQPTDVDPPGESAQSHPTSACNNRCS

SEQ ID NO: 46041 - protein, 85 aa, unidentified; identical to SEQ ID NO: 14006
  REGION 1..85: note = Description of Unknown:random_neg_ctrl neg_ctrl sequence

SEQ ID NO: 46042 - protein, 31 aa, unidentified; identical to SEQ ID NO: 14007
  REGION 1..31: note = Description of Unknown:random_neg_ctrl neg_ctrl sequence

SEQ ID NO: 46043 - protein, 85 aa, unidentified
  REGION 1..85: note = Description of Unknown:random_neg_ctrl neg_ctrl sequence
LAKRWPMEFLNANHLSWWELKKGKGSPASVDMLVLRVDAFGLVHPTRVSKTPPSLRSLHECFEFEYTEREPVTYSIKFQACGEAP

SEQ ID NO: 46044 - protein, 85 aa, unidentified; identical to SEQ ID NO: 14009
  REGION 1..85: note = Description of Unknown:random_neg_ctrl neg_ctrl sequence

SEQ ID NO: 46045 - protein, 84 aa, unidentified; identical to SEQ ID NO: 14010
  REGION 1..84: note = Description of Unknown:random_neg_ctrl neg_ctrl sequence

SEQ ID NO: 46046 - protein, 85 aa, unidentified
  REGION 1..85: note = Description of Unknown:random_neg_ctrl neg_ctrl sequence
LDIPAEKSFKMWMILSTLMDRKEKPERNYMFDKDGELLWLVQRGKMEPKLNASYLTGALKDGFSKDGLAGPIDRRVLERYKIIVE

SEQ ID NO: 46047 - protein, 85 aa, unidentified
  REGION 1..85: note = Description of Unknown:random_neg_ctrl neg_ctrl sequence
LDKAPIPELSAANLQKRECATAPIGNADPGEISDVGDLHFEFLVDEELLPKLSGMDTCSWVAVAHGGGQHISWPLMKDYLHLMPA

SEQ ID NO: 46048 - protein, 85 aa, unidentified; identical to SEQ ID NO: 14013
  REGION 1..85: note = Description of Unknown:random_neg_ctrl neg_ctrl sequence

SEQ ID NO: 46049 - protein, 85 aa, unidentified; identical to SEQ ID NO: 14014
  REGION 1..85: note = Description of Unknown:random_neg_ctrl neg_ctrl sequence

SEQ ID NO: 46050 - protein, 85 aa, unidentified; identical to SEQ ID NO: 14015
  REGION 1..85: note = Description of Unknown:random_neg_ctrl neg_ctrl sequence

SEQ ID NO: 46051 - protein, 85 aa, unidentified; identical to SEQ ID NO: 14016
  REGION 1..85: note = Description of Unknown:random_neg_ctrl neg_ctrl sequence

SEQ ID NO: 46052 - protein, 84 aa, unidentified; identical to SEQ ID NO: 14017
  REGION 1..84: note = Description of Unknown:random_neg_ctrl neg_ctrl sequence

SEQ ID NO: 46053 - protein, 85 aa, unidentified; identical to SEQ ID NO: 14018
  REGION 1..85: note = Description of Unknown:random_neg_ctrl neg_ctrl sequence

SEQ ID NO: 46054 - protein, 85 aa, unidentified; identical to SEQ ID NO: 14019
  REGION 1..85: note = Description of Unknown:random_neg_ctrl neg_ctrl sequence

SEQ ID NO: 46055 - protein, 8 aa, unidentified
  REGION 1..8: note = Description of Unknown:random_neg_ctrl neg_ctrl sequence
SLLEAITR

SEQ ID NO: 46056 - protein, 85 aa, unidentified; identical to SEQ ID NO: 14021
  REGION 1..85: note = Description of Unknown:random_neg_ctrl neg_ctrl sequence

SEQ ID NO: 46057 - protein, 85 aa, unidentified; identical to SEQ ID NO: 14022
  REGION 1..85: note = Description of Unknown:random_neg_ctrl neg_ctrl sequence

SEQ ID NO: 46058 - protein, 85 aa, unidentified; identical to SEQ ID NO: 14023
  REGION 1..85: note = Description of Unknown:random_neg_ctrl neg_ctrl sequence

SEQ ID NO: 46059 - protein, 84 aa, unidentified; identical to SEQ ID NO: 14024
  REGION 1..84: note = Description of Unknown:random_neg_ctrl neg_ctrl sequence

SEQ ID NO: 46060 - protein, 85 aa, unidentified; identical to SEQ ID NO: 14025
  REGION 1..85: note = Description of Unknown:random_neg_ctrl neg_ctrl sequence

SEQ ID NO: 46061 - protein, 85 aa, unidentified; identical to SEQ ID NO: 14026
  REGION 1..85: note = Description of Unknown:random_neg_ctrl neg_ctrl sequence

SEQ ID NO: 46062 - protein, 85 aa, unidentified; identical to SEQ ID NO: 14027
  REGION 1..85: note = Description of Unknown:random_neg_ctrl neg_ctrl sequence

SEQ ID NO: 46063 - protein, 84 aa, unidentified; identical to SEQ ID NO: 14028
  REGION 1..84: note = Description of Unknown:random_neg_ctrl neg_ctrl sequence

SEQ ID NO: 46064 - protein, 85 aa, unidentified; identical to SEQ ID NO: 14029
  REGION 1..85: note = Description of Unknown:random_neg_ctrl neg_ctrl sequence

SEQ ID NO: 46065 - protein, 85 aa, unidentified; identical to SEQ ID NO: 14030
  REGION 1..85: note = Description of Unknown:random_neg_ctrl neg_ctrl sequence

SEQ ID NO: 46066 - protein, 85 aa, unidentified; identical to SEQ ID NO: 14031
  REGION 1..85: note = Description of Unknown:random_neg_ctrl neg_ctrl sequence

SEQ ID NO: 46067 - protein, 85 aa, unidentified; identical to SEQ ID NO: 14032
  REGION 1..85: note = Description of Unknown:random_neg_ctrl neg_ctrl sequence

SEQ ID NO: 46068 - protein, 85 aa, unidentified; identical to SEQ ID NO: 14033
  REGION 1..85: note = Description of Unknown:random_neg_ctrl neg_ctrl sequence

SEQ ID NO: 46069 - protein, 85 aa, unidentified; identical to SEQ ID NO: 14034
  REGION 1..85: note = Description of Unknown:random_neg_ctrl neg_ctrl sequence

SEQ ID NO: 46070 - protein, 85 aa, unidentified; identical to SEQ ID NO: 14035
  REGION 1..85: note = Description of Unknown:random_neg_ctrl neg_ctrl sequence

SEQ ID NO: 46071 - protein, 85 aa, unidentified; identical to SEQ ID NO: 14036
  REGION 1..85: note = Description of Unknown:random_neg_ctrl neg_ctrl sequence

SEQ ID NO: 46072 - protein, 85 aa, unidentified; identical to SEQ ID NO: 14037
  REGION 1..85: note = Description of Unknown:random_neg_ctrl neg_ctrl sequence

SEQ ID NO: 46073 - protein, 85 aa, unidentified; identical to SEQ ID NO: 14038
  REGION 1..85: note = Description of Unknown:random_neg_ctrl neg_ctrl sequence

SEQ ID NO: 46074 - protein, 85 aa, unidentified; identical to SEQ ID NO: 14039
  REGION 1..85: note = Description of Unknown:random_neg_ctrl neg_ctrl sequence

SEQ ID NO: 46075 - protein, 85 aa, unidentified; identical to SEQ ID NO: 14040
  REGION 1..85: note = Description of Unknown:random_neg_ctrl neg_ctrl sequence

SEQ ID NO: 46076 - protein, 65 aa, unidentified; identical to SEQ ID NO: 14041
  REGION 1..65: note = Description of Unknown:random_neg_ctrl neg_ctrl sequence

SEQ ID NO: 46077 - protein, 85 aa, unidentified; identical to SEQ ID NO: 14042
  REGION 1..85: note = Description of Unknown:random_neg_ctrl neg_ctrl sequence

SEQ ID NO: 46078 - protein, 85 aa, unidentified; identical to SEQ ID NO: 14043
  REGION 1..85: note = Description of Unknown:random_neg_ctrl neg_ctrl sequence

SEQ ID NO: 46079 - protein, 85 aa, unidentified; identical to SEQ ID NO: 14044
  REGION 1..85: note = Description of Unknown:random_neg_ctrl neg_ctrl sequence

SEQ ID NO: 46080 - protein, 85 aa, unidentified
  REGION 1..85: note = Description of Unknown:random_neg_ctrl neg_ctrl sequence
LFIFFVDGLMQPILDCKKVKARYSEMLGGCTEENSDGGPTKVKTVNSAVYMVNEEKHPIARLCLIFGENLPPSQLQSDQGSKGLA

SEQ ID NO: 46081 - protein, 85 aa, unidentified; identical to SEQ ID NO: 14046
  REGION 1..85: note = Description of Unknown:random_neg_ctrl neg_ctrl sequence

SEQ ID NO: 46082 - protein, 79 aa, unidentified; identical to SEQ ID NO: 14047
  REGION 1..79: note = Description of Unknown:random_neg_ctrl neg_ctrl sequence

SEQ ID NO: 46083 - protein, 38 aa, unidentified; identical to SEQ ID NO: 14048
  REGION 1..38: note = Description of Unknown:random_neg_ctrl neg_ctrl sequence

SEQ ID NO: 46084 - protein, 25 aa, unidentified
  REGION 1..25: note = Description of Unknown:random_neg_ctrl neg_ctrl sequence
QWSSLFPMAKGDVELLQGDGIPEVS

SEQ ID NO: 46085 - protein, 85 aa, unidentified; identical to SEQ ID NO: 14050
  REGION 1..85: note = Description of Unknown:random_neg_ctrl neg_ctrl sequence

SEQ ID NO: 46086 - protein, 64 aa, unidentified; identical to SEQ ID NO: 14051
  REGION 1..64: note = Description of Unknown:random_neg_ctrl neg_ctrl sequence

SEQ ID NO: 46087 - protein, 85 aa, unidentified; identical to SEQ ID NO: 14052
  REGION 1..85: note = Description of Unknown:random_neg_ctrl neg_ctrl sequence

SEQ ID NO: 46088 - protein, 85 aa, unidentified; identical to SEQ ID NO: 14053
  REGION 1..85: note = Description of Unknown:random_neg_ctrl neg_ctrl sequence

SEQ ID NO: 46089 - protein, 60 aa, unidentified; identical to SEQ ID NO: 14054
  REGION 1..60: note = Description of Unknown:random_neg_ctrl neg_ctrl sequence

SEQ ID NO: 46090 - protein, 10 aa, unidentified
  REGION 1..10: note = Description of Unknown:random_neg_ctrl neg_ctrl sequence
KISVIDETPW

SEQ ID NO: 46091 - protein, 85 aa, unidentified; identical to SEQ ID NO: 14056
  REGION 1..85: note = Description of Unknown:random_neg_ctrl neg_ctrl sequence

SEQ ID NO: 46092 - protein, 85 aa, unidentified; identical to SEQ ID NO: 14057
  REGION 1..85: note = Description of Unknown:random_neg_ctrl neg_ctrl sequence

SEQ ID NO: 46093 - protein, 85 aa, unidentified; identical to SEQ ID NO: 14058
  REGION 1..85: note = Description of Unknown:random_neg_ctrl neg_ctrl sequence

SEQ ID NO: 46094 - protein, 85 aa, unidentified; identical to SEQ ID NO: 14059
  REGION 1..85: note = Description of Unknown:random_neg_ctrl neg_ctrl sequence

SEQ ID NO: 46095 - protein, 85 aa, unidentified; identical to SEQ ID NO: 14060
  REGION 1..85: note = Description of Unknown:random_neg_ctrl neg_ctrl sequence

SEQ ID NO: 46096 - protein, 85 aa, unidentified; identical to SEQ ID NO: 14061
  REGION 1..85: note = Description of Unknown:random_neg_ctrl neg_ctrl sequence

SEQ ID NO: 46097 - protein, 85 aa, unidentified; identical to SEQ ID NO: 14062
  REGION 1..85: note = Description of Unknown:random_neg_ctrl neg_ctrl sequence

SEQ ID NO: 46098 - protein, 65 aa, unidentified; identical to SEQ ID NO: 14063
  REGION 1..65: note = Description of Unknown:random_neg_ctrl neg_ctrl sequence

SEQ ID NO: 46099 - protein, 85 aa, unidentified; identical to SEQ ID NO: 14064
  REGION 1..85: note = Description of Unknown:random_neg_ctrl neg_ctrl sequence

SEQ ID NO: 46100 - protein, 56 aa, unidentified; identical to SEQ ID NO: 14065
  REGION 1..56: note = Description of Unknown:random_neg_ctrl neg_ctrl sequence

SEQ ID NO: 46101 - protein, 85 aa, unidentified; identical to SEQ ID NO: 14066
  REGION 1..85: note = Description of Unknown:random_neg_ctrl neg_ctrl sequence

SEQ ID NO: 46102 - protein, 85 aa, unidentified; identical to SEQ ID NO: 14067
  REGION 1..85: note = Description of Unknown:random_neg_ctrl neg_ctrl sequence

SEQ ID NO: 46103 - protein, 85 aa, unidentified; identical to SEQ ID NO: 14068
  REGION 1..85: note = Description of Unknown:random_neg_ctrl neg_ctrl sequence

SEQ ID NO: 46104 - protein, 85 aa, unidentified; identical to SEQ ID NO: 14069
  REGION 1..85: note = Description of Unknown:random_neg_ctrl neg_ctrl sequence

SEQ ID NO: 46105 - protein, 85 aa, unidentified
  REGION 1..85: note = Description of Unknown:random_neg_ctrl neg_ctrl sequence
LNDVLRFKVVSQLPALDNSKFQFSQLELILAPEGEIFESVLRFRSSNGGTDPFVRWMIAAILSHLLFQKAEGALASAECIVTQTH

SEQ ID NO: 46106 - protein, 4 aa, unidentified
  REGION 1..4: note = Description of Unknown:random_neg_ctrl neg_ctrl sequence
PEYI

SEQ ID NO: 46107 - protein, 85 aa, unidentified; identical to SEQ ID NO: 14072
  REGION 1..85: note = Description of Unknown:random_neg_ctrl neg_ctrl sequence

SEQ ID NO: 46108 - protein, 85 aa, unidentified; identical to SEQ ID NO: 14073
  REGION 1..85: note = Description of Unknown:random_neg_ctrl neg_ctrl sequence

SEQ ID NO: 46109 - protein, 79 aa, unidentified; identical to SEQ ID NO: 14074
  REGION 1..79: note = Description of Unknown:random_neg_ctrl neg_ctrl sequence

SEQ ID NO: 46110 - protein, 85 aa, unidentified; identical to SEQ ID NO: 14075
  REGION 1..85: note = Description of Unknown:random_neg_ctrl neg_ctrl sequence

SEQ ID NO: 46111 - protein, 37 aa, unidentified; identical to SEQ ID NO: 14076
  REGION 1..37: note = Description of Unknown:random_neg_ctrl neg_ctrl sequence

SEQ ID NO: 46112 - protein, 85 aa, unidentified; identical to SEQ ID NO: 14077
  REGION 1..85: note = Description of Unknown:random_neg_ctrl neg_ctrl sequence

SEQ ID NO: 46113 - protein, 85 aa, unidentified; identical to SEQ ID NO: 14078
  REGION 1..85: note = Description of Unknown:random_neg_ctrl neg_ctrl sequence

SEQ ID NO: 46114 - protein, 83 aa, unidentified; identical to SEQ ID NO: 14079
  REGION 1..83: note = Description of Unknown:random_neg_ctrl neg_ctrl sequence

SEQ ID NO: 46115 - protein, 85 aa, unidentified; identical to SEQ ID NO: 14080
  REGION 1..85: note = Description of Unknown:random_neg_ctrl neg_ctrl sequence

SEQ ID NO: 46116 - protein, 85 aa, unidentified; identical to SEQ ID NO: 14081
  REGION 1..85: note = Description of Unknown:random_neg_ctrl neg_ctrl sequence

SEQ ID NO: 46117 - protein, 85 aa, unidentified; identical to SEQ ID NO: 14082
  REGION 1..85: note = Description of Unknown:random_neg_ctrl neg_ctrl sequence

SEQ ID NO: 46118 - protein, 34 aa, unidentified; identical to SEQ ID NO: 14083
  REGION 1..34: note = Description of Unknown:random_neg_ctrl neg_ctrl sequence

SEQ ID NO: 46119 - protein, 85 aa, unidentified; identical to SEQ ID NO: 14084
  REGION 1..85: note = Description of Unknown:random_neg_ctrl neg_ctrl sequence

SEQ ID NO: 46120 - protein, 85 aa, unidentified; identical to SEQ ID NO: 14085
  REGION 1..85: note = Description of Unknown:random_neg_ctrl neg_ctrl sequence

SEQ ID NO: 46121 - protein, 85 aa, unidentified; identical to SEQ ID NO: 14086
  REGION 1..85: note = Description of Unknown:random_neg_ctrl neg_ctrl sequence

SEQ ID NO: 46122 - protein, 65 aa, unidentified
  REGION 1..65: note = Description of Unknown:random_neg_ctrl neg_ctrl sequence
LHSGPVGSLILVSSGQLAPFAEPAFEDIDAVHGPFRFDELKHFDAELALVEPQTKDECNGPQKSI

SEQ ID NO: 46123 - protein, 84 aa, unidentified; identical to SEQ ID NO: 14088
  REGION 1..84: note = Description of Unknown:random_neg_ctrl neg_ctrl sequence

SEQ ID NO: 46124 - protein, 85 aa, unidentified; identical to SEQ ID NO: 14089
  REGION 1..85: note = Description of Unknown:random_neg_ctrl neg_ctrl sequence

SEQ ID NO: 46125 - protein, 85 aa, unidentified; identical to SEQ ID NO: 14090
  REGION 1..85: note = Description of Unknown:random_neg_ctrl neg_ctrl sequence

SEQ ID NO: 46126 - protein, 22 aa, unidentified
  REGION 1..22: note = Description of Unknown:random_neg_ctrl neg_ctrl sequence
ADPEQPSLVSRYGGFRTVSMFL

SEQ ID NO: 46127 - protein, 85 aa, unidentified; identical to SEQ ID NO: 14092
  REGION 1..85: note = Description of Unknown:random_neg_ctrl neg_ctrl sequence

SEQ ID NO: 46128 - protein, 85 aa, unidentified; identical to SEQ ID NO: 14093
  REGION 1..85: note = Description of Unknown:random_neg_ctrl neg_ctrl sequence

SEQ ID NO: 46129 - protein, 84 aa, unidentified; identical to SEQ ID NO: 14094
  REGION 1..84: note = Description of Unknown:random_neg_ctrl neg_ctrl sequence

SEQ ID NO: 46130 - protein, 85 aa, unidentified; identical to SEQ ID NO: 14095
  REGION 1..85: note = Description of Unknown:random_neg_ctrl neg_ctrl sequence

SEQ ID NO: 46131 - protein, 84 aa, unidentified; identical to SEQ ID NO: 14096
  REGION 1..84: note = Description of Unknown:random_neg_ctrl neg_ctrl sequence

SEQ ID NO: 46132 - protein, 85 aa, unidentified; identical to SEQ ID NO: 14097
  REGION 1..85: note = Description of Unknown:random_neg_ctrl neg_ctrl sequence

SEQ ID NO: 46133 - protein, 85 aa, unidentified; identical to SEQ ID NO: 14098
  REGION 1..85: note = Description of Unknown:random_neg_ctrl neg_ctrl sequence

SEQ ID NO: 46134 - protein, 84 aa, unidentified; identical to SEQ ID NO: 14099
  REGION 1..84: note = Description of Unknown:random_neg_ctrl neg_ctrl sequence

SEQ ID NO: 46135 - protein, 85 aa, unidentified; identical to SEQ ID NO: 14100
  REGION 1..85: note = Description of Unknown:random_neg_ctrl neg_ctrl sequence

SEQ ID NO: 46136 - protein, 85 aa, unidentified; identical to SEQ ID NO: 14101
  REGION 1..85: note = Description of Unknown:random_neg_ctrl neg_ctrl sequence

SEQ ID NO: 46137 - protein, 85 aa, unidentified; identical to SEQ ID NO: 14102
  REGION 1..85: note = Description of Unknown:random_neg_ctrl neg_ctrl sequence

SEQ ID NO: 46138 - protein, 41 aa, unidentified; identical to SEQ ID NO: 14103
  REGION 1..41: note = Description of Unknown:random_neg_ctrl neg_ctrl sequence

SEQ ID NO: 46139 - protein, 85 aa, unidentified; identical to SEQ ID NO: 14104
  REGION 1..85: note = Description of Unknown:random_neg_ctrl neg_ctrl sequence

SEQ ID NO: 46140 - protein, 85 aa, unidentified; identical to SEQ ID NO: 14105
  REGION 1..85: note = Description of Unknown:random_neg_ctrl neg_ctrl sequence

SEQ ID NO: 46141 - protein, 84 aa, unidentified; identical to SEQ ID NO: 14106
  REGION 1..84: note = Description of Unknown:random_neg_ctrl neg_ctrl sequence

SEQ ID NO: 46142 - protein, 85 aa, unidentified; identical to SEQ ID NO: 14107
  REGION 1..85: note = Description of Unknown:random_neg_ctrl neg_ctrl sequence

SEQ ID NO: 46143 - protein, 82 aa, unidentified; identical to SEQ ID NO: 14108
  REGION 1..82: note = Description of Unknown:random_neg_ctrl neg_ctrl sequence

SEQ ID NO: 46144 - protein, 85 aa, unidentified; identical to SEQ ID NO: 14109
  REGION 1..85: note = Description of Unknown:random_neg_ctrl neg_ctrl sequence

SEQ ID NO: 46145 - protein, 85 aa, unidentified; identical to SEQ ID NO: 14110
  REGION 1..85: note = Description of Unknown:random_neg_ctrl neg_ctrl sequence

SEQ ID NO: 46146 - protein, 85 aa, unidentified; identical to SEQ ID NO: 14111
  REGION 1..85: note = Description of Unknown:random_neg_ctrl neg_ctrl sequence

SEQ ID NO: 46147 - protein, 85 aa, unidentified; identical to SEQ ID NO: 14112
  REGION 1..85: note = Description of Unknown:random_neg_ctrl neg_ctrl sequence

SEQ ID NO: 46148 - protein, 84 aa, unidentified; identical to SEQ ID NO: 14113
  REGION 1..84: note = Description of Unknown:random_neg_ctrl neg_ctrl sequence

SEQ ID NO: 46149 - protein, 85 aa, unidentified; identical to SEQ ID NO: 14114
  REGION 1..85: note = Description of Unknown:random_neg_ctrl neg_ctrl sequence

SEQ ID NO: 46150 - protein, 34 aa, unidentified; identical to SEQ ID NO: 14115
  REGION 1..34: note = Description of Unknown:random_neg_ctrl neg_ctrl sequence

SEQ ID NO: 46151 - protein, 85 aa, unidentified; identical to SEQ ID NO: 14116
  REGION 1..85: note = Description of Unknown:random_neg_ctrl neg_ctrl sequence

SEQ ID NO: 46152 - protein, 85 aa, unidentified; identical to SEQ ID NO: 14117
  REGION 1..85: note = Description of Unknown:random_neg_ctrl neg_ctrl sequence

SEQ ID NO: 46153 - protein, 85 aa, unidentified; identical to SEQ ID NO: 14118
  REGION 1..85: note = Description of Unknown:random_neg_ctrl neg_ctrl sequence

SEQ ID NO: 46154 - protein, 85 aa, unidentified; identical to SEQ ID NO: 14119
  REGION 1..85: note = Description of Unknown:random_neg_ctrl neg_ctrl sequence

SEQ ID NO: 46155 - protein, 85 aa, unidentified; identical to SEQ ID NO: 14120
  REGION 1..85: note = Description of Unknown:random_neg_ctrl neg_ctrl sequence

SEQ ID NO: 46156 - protein, 85 aa, unidentified; identical to SEQ ID NO: 14121
  REGION 1..85: note = Description of Unknown:random_neg_ctrl neg_ctrl sequence

SEQ ID NO: 46157 - protein, 85 aa, unidentified; identical to SEQ ID NO: 14122
  REGION 1..85: note = Description of Unknown:random_neg_ctrl neg_ctrl sequence

SEQ ID NO: 46158 - protein, 85 aa, unidentified; identical to SEQ ID NO: 14123
  REGION 1..85: note = Description of Unknown:random_neg_ctrl neg_ctrl sequence

SEQ ID NO: 46159 - protein, 85 aa, unidentified; identical to SEQ ID NO: 14124
  REGION 1..85: note = Description of Unknown:random_neg_ctrl neg_ctrl sequence

SEQ ID NO: 46160 - protein, 85 aa, unidentified; identical to SEQ ID NO: 14125
  REGION 1..85: note = Description of Unknown:random_neg_ctrl neg_ctrl sequence

SEQ ID NO: 46161 - protein, 4 aa, unidentified
  REGION 1..4: note = Description of Unknown:random_neg_ctrl neg_ctrl sequence
GSQG

SEQ ID NO: 46162 - protein, 85 aa, unidentified; identical to SEQ ID NO: 14127
  REGION 1..85: note = Description of Unknown:random_neg_ctrl neg_ctrl sequence

SEQ ID NO: 46163 - protein, 85 aa, unidentified; identical to SEQ ID NO: 14128
  REGION 1..85: note = Description of Unknown:random_neg_ctrl neg_ctrl sequence

SEQ ID NO: 46164 - protein, 84 aa, unidentified; identical to SEQ ID NO: 14129
  REGION 1..84: note = Description of Unknown:random_neg_ctrl neg_ctrl sequence

SEQ ID NO: 46165 - protein, 84 aa, unidentified; identical to SEQ ID NO: 14130
  REGION 1..84: note = Description of Unknown:random_neg_ctrl neg_ctrl sequence

SEQ ID NO: 46166 - protein, 85 aa, unidentified; identical to SEQ ID NO: 14131
  REGION 1..85: note = Description of Unknown:random_neg_ctrl neg_ctrl sequence

SEQ ID NO: 46167 - protein, 18 aa, unidentified
  REGION 1..18: note = Description of Unknown:random_neg_ctrl neg_ctrl sequence
MLCSREKRQCSQPAGHRG

SEQ ID NO: 46168 - protein, 85 aa, unidentified; identical to SEQ ID NO: 14133
  REGION 1..85: note = Description of Unknown:random_neg_ctrl neg_ctrl sequence

SEQ ID NO: 46169 - protein, 85 aa, unidentified; identical to SEQ ID NO: 14134
  REGION 1..85: note = Description of Unknown:random_neg_ctrl neg_ctrl sequence

SEQ ID NO: 46170 - protein, 85 aa, unidentified; identical to SEQ ID NO: 14135
  REGION 1..85: note = Description of Unknown:random_neg_ctrl neg_ctrl sequence

SEQ ID NO: 46171 - protein, 85 aa, unidentified; identical to SEQ ID NO: 14136
  REGION 1..85: note = Description of Unknown:random_neg_ctrl neg_ctrl sequence

SEQ ID NO: 46172 - protein, 85 aa, unidentified; identical to SEQ ID NO: 14137
  REGION 1..85: note = Description of Unknown:random_neg_ctrl neg_ctrl sequence

SEQ ID NO: 46173 - protein, 85 aa, unidentified; identical to SEQ ID NO: 14138
  REGION 1..85: note = Description of Unknown:random_neg_ctrl neg_ctrl sequence

SEQ ID NO: 46174 - protein, 85 aa, unidentified; identical to SEQ ID NO: 14139
  REGION 1..85: note = Description of Unknown:random_neg_ctrl neg_ctrl sequence

SEQ ID NO: 46175 - protein, 84 aa, unidentified; identical to SEQ ID NO: 14140
  REGION 1..84: note = Description of Unknown:random_neg_ctrl neg_ctrl sequence

SEQ ID NO: 46176 - protein, 85 aa, unidentified; identical to SEQ ID NO: 14141
  REGION 1..85: note = Description of Unknown:random_neg_ctrl neg_ctrl sequence

SEQ ID NO: 46177 - protein, 57 aa, unidentified; identical to SEQ ID NO: 14142
  REGION 1..57: note = Description of Unknown:random_neg_ctrl neg_ctrl sequence

SEQ ID NO: 46178 - protein, 85 aa, unidentified; identical to SEQ ID NO: 14143
  REGION 1..85: note = Description of Unknown:random_neg_ctrl neg_ctrl sequence

SEQ ID NO: 46179 - protein, 85 aa, unidentified; identical to SEQ ID NO: 14144
  REGION 1..85: note = Description of Unknown:random_neg_ctrl neg_ctrl sequence

SEQ ID NO: 46180 - protein, 85 aa, unidentified; identical to SEQ ID NO: 14145
  REGION 1..85: note = Description of Unknown:random_neg_ctrl neg_ctrl sequence

SEQ ID NO: 46181 - protein, 85 aa, unidentified; identical to SEQ ID NO: 14146
  REGION 1..85: note = Description of Unknown:random_neg_ctrl neg_ctrl sequence

SEQ ID NO: 46182 - protein, 85 aa, unidentified; identical to SEQ ID NO: 14147
  REGION 1..85: note = Description of Unknown:random_neg_ctrl neg_ctrl sequence

SEQ ID NO: 46183 - protein, 18 aa, unidentified
  REGION 1..18: note = Description of Unknown:random_neg_ctrl neg_ctrl sequence
LSENEDIGLLRLGHQEVD

SEQ ID NO: 46184 - protein, 47 aa, unidentified; identical to SEQ ID NO: 14149
  REGION 1..47: note = Description of Unknown:random_neg_ctrl neg_ctrl sequence

SEQ ID NO: 46185 - protein, 85 aa, unidentified; identical to SEQ ID NO: 14150
  REGION 1..85: note = Description of Unknown:random_neg_ctrl neg_ctrl sequence

SEQ ID NO: 46186 - protein, 85 aa, unidentified; identical to SEQ ID NO: 14151
  REGION 1..85: note = Description of Unknown:random_neg_ctrl neg_ctrl sequence

SEQ ID NO: 46187 - protein, 85 aa, unidentified; identical to SEQ ID NO: 14152
  REGION 1..85: note = Description of Unknown:random_neg_ctrl neg_ctrl sequence

SEQ ID NO: 46188 - protein, 85 aa, unidentified; identical to SEQ ID NO: 14153
  REGION 1..85: note = Description of Unknown:random_neg_ctrl neg_ctrl sequence

SEQ ID NO: 46189 - protein, 84 aa, unidentified; identical to SEQ ID NO: 14154
  REGION 1..84: note = Description of Unknown:random_neg_ctrl neg_ctrl sequence

SEQ ID NO: 46190 - protein, 85 aa, unidentified; identical to SEQ ID NO: 14155
  REGION 1..85: note = Description of Unknown:random_neg_ctrl neg_ctrl sequence

SEQ ID NO: 46191 - protein, 85 aa, unidentified; identical to SEQ ID NO: 14156
  REGION 1..85: note = Description of Unknown:random_neg_ctrl neg_ctrl sequence

SEQ ID NO: 46192 - protein, 85 aa, unidentified; identical to SEQ ID NO: 14157
  REGION 1..85: note = Description of Unknown:random_neg_ctrl neg_ctrl sequence

SEQ ID NO: 46193 - protein, 85 aa, unidentified; identical to SEQ ID NO: 14158
  REGION 1..85: note = Description of Unknown:random_neg_ctrl neg_ctrl sequence

SEQ ID NO: 46194 - protein, 85 aa, unidentified; identical to SEQ ID NO: 14159
  REGION 1..85: note = Description of Unknown:random_neg_ctrl neg_ctrl sequence

SEQ ID NO: 46195 - protein, 85 aa, unidentified; identical to SEQ ID NO: 14160
  REGION 1..85: note = Description of Unknown:random_neg_ctrl neg_ctrl sequence

SEQ ID NO: 46196 - protein, 22 aa, unidentified
  REGION 1..22: note = Description of Unknown:random_neg_ctrl neg_ctrl sequence
GSLMQSHHPLLSRKPAMTQRIR

SEQ ID NO: 46197 - protein, 85 aa, unidentified; identical to SEQ ID NO: 14162
  REGION 1..85: note = Description of Unknown:random_neg_ctrl neg_ctrl sequence

SEQ ID NO: 46198 - protein, 85 aa, unidentified; identical to SEQ ID NO: 14163
  REGION 1..85: note = Description of Unknown:random_neg_ctrl neg_ctrl sequence

SEQ ID NO: 46199 - protein, 85 aa, unidentified; identical to SEQ ID NO: 14164
  REGION 1..85: note = Description of Unknown:random_neg_ctrl neg_ctrl sequence

SEQ ID NO: 46200 - protein, 85 aa, unidentified; identical to SEQ ID NO: 14165
  REGION 1..85: note = Description of Unknown:random_neg_ctrl neg_ctrl sequence

SEQ ID NO: 46201 - protein, 85 aa, unidentified; identical to SEQ ID NO: 14166
  REGION 1..85: note = Description of Unknown:random_neg_ctrl neg_ctrl sequence

SEQ ID NO: 46202 - protein, 85 aa, unidentified; identical to SEQ ID NO: 14167
  REGION 1..85: note = Description of Unknown:random_neg_ctrl neg_ctrl sequence

SEQ ID NO: 46203 - protein, 85 aa, unidentified; identical to SEQ ID NO: 14168
  REGION 1..85: note = Description of Unknown:random_neg_ctrl neg_ctrl sequence

SEQ ID NO: 46204 - protein, 85 aa, unidentified; identical to SEQ ID NO: 14169
  REGION 1..85: note = Description of Unknown:random_neg_ctrl neg_ctrl sequence

SEQ ID NO: 46205 - protein, 85 aa, unidentified; identical to SEQ ID NO: 14170
  REGION 1..85: note = Description of Unknown:random_neg_ctrl neg_ctrl sequence

SEQ ID NO: 46206 - protein, 84 aa, unidentified; identical to SEQ ID NO: 14171
  REGION 1..84: note = Description of Unknown:random_neg_ctrl neg_ctrl sequence

SEQ ID NO: 46207 - protein, 85 aa, unidentified; identical to SEQ ID NO: 14172
  REGION 1..85: note = Description of Unknown:random_neg_ctrl neg_ctrl sequence

SEQ ID NO: 46208 - protein, 85 aa, unidentified; identical to SEQ ID NO: 14173
  REGION 1..85: note = Description of Unknown:random_neg_ctrl neg_ctrl sequence

SEQ ID NO: 46209 - protein, 85 aa, unidentified; identical to SEQ ID NO: 14174
  REGION 1..85: note = Description of Unknown:random_neg_ctrl neg_ctrl sequence

SEQ ID NO: 46210 - protein, 85 aa, unidentified; identical to SEQ ID NO: 14175
  REGION 1..85: note = Description of Unknown:random_neg_ctrl neg_ctrl sequence

SEQ ID NO: 46211 - protein, 55 aa, unidentified; identical to SEQ ID NO: 14176
  REGION 1..55: note = Description of Unknown:random_neg_ctrl neg_ctrl sequence

SEQ ID NO: 46212 - protein, 85 aa, unidentified; identical to SEQ ID NO: 14177
  REGION 1..85: note = Description of Unknown:random_neg_ctrl neg_ctrl sequence

SEQ ID NO: 46213 - protein, 85 aa, unidentified; identical to SEQ ID NO: 14178
  REGION 1..85: note = Description of Unknown:random_neg_ctrl neg_ctrl sequence

SEQ ID NO: 46214 - protein, 85 aa, unidentified; identical to SEQ ID NO: 14179
  REGION 1..85: note = Description of Unknown:random_neg_ctrl neg_ctrl sequence

SEQ ID NO: 46215 - protein, 85 aa, unidentified; identical to SEQ ID NO: 14180
  REGION 1..85: note = Description of Unknown:random_neg_ctrl neg_ctrl sequence

SEQ ID NO: 46216 - protein, 85 aa, unidentified; identical to SEQ ID NO: 14181
  REGION 1..85: note = Description of Unknown:random_neg_ctrl neg_ctrl sequence

SEQ ID NO: 46217 - protein, 85 aa, unidentified; identical to SEQ ID NO: 14182
  REGION 1..85: note = Description of Unknown:random_neg_ctrl neg_ctrl sequence

SEQ ID NO: 46218 - protein, 85 aa, unidentified; identical to SEQ ID NO: 14183
  REGION 1..85: note = Description of Unknown:random_neg_ctrl neg_ctrl sequence

SEQ ID NO: 46219 - protein, 85 aa, unidentified; identical to SEQ ID NO: 14184
  REGION 1..85: note = Description of Unknown:random_neg_ctrl neg_ctrl sequence

SEQ ID NO: 46220 - protein, 85 aa, unidentified
  REGION 1..85: note = Description of Unknown:random_neg_ctrl neg_ctrl sequence
LLSMRREAHVGVSPAENADEKSSQIESEPCTVGPFSTPKLARDASRAAAHRSKDDNVFKAILENCRRTRDLPLCYAGPHFKQSVA

SEQ ID NO: 46221 - protein, 14 aa, unidentified
  REGION 1..14: note = Description of Unknown:random_neg_ctrl neg_ctrl sequence
PNSERKKGASLRGP

SEQ ID NO: 46222 - protein, 85 aa, unidentified; identical to SEQ ID NO: 14187
  REGION 1..85: note = Description of Unknown:random_neg_ctrl neg_ctrl sequence

SEQ ID NO: 46223 - protein, 85 aa, unidentified
  REGION 1..85: note = Description of Unknown:random_neg_ctrl neg_ctrl sequence
LTEPLSVFNPECRYYKETKDKLRDENSTRFNKIRAVQSVCWRPYDKDMMVTLQLNALNADKPGWGDSDAQRQLHNTLRQPSSQDP

SEQ ID NO: 46224 - protein, 85 aa, unidentified; identical to SEQ ID NO: 14189
  REGION 1..85: note = Description of Unknown:random_neg_ctrl neg_ctrl sequence

SEQ ID NO: 46225 - protein, 85 aa, unidentified
  REGION 1..85: note = Description of Unknown:random_neg_ctrl neg_ctrl sequence
LTAFSLKWEKGKKMPEPAETLLKTKKSQLAGARLLKEDAINMLLGQESQWPPRDHMKDVIFGGTGLPEDEALLEEMGGAAPAFKE

SEQ ID NO: 46226 - protein, 85 aa, unidentified; identical to SEQ ID NO: 14191
  REGION 1..85: note = Description of Unknown:random_neg_ctrl neg_ctrl sequence

SEQ ID NO: 46227 - protein, 85 aa, unidentified; identical to SEQ ID NO: 14192
  REGION 1..85: note = Description of Unknown:random_neg_ctrl neg_ctrl sequence

SEQ ID NO: 46228 - protein, 85 aa, unidentified; identical to SEQ ID NO: 14193
  REGION 1..85: note = Description of Unknown:random_neg_ctrl neg_ctrl sequence

SEQ ID NO: 46229 - protein, 8 aa, unidentified
  REGION 1..8: note = Description of Unknown:random_neg_ctrl neg_ctrl sequence
GLNLEDSE

SEQ ID NO: 46230 - protein, 60 aa, unidentified; identical to SEQ ID NO: 14195
  REGION 1..60: note = Description of Unknown:random_neg_ctrl neg_ctrl sequence

SEQ ID NO: 46231 - protein, 32 aa, unidentified; identical to SEQ ID NO: 14196
  REGION 1..32: note = Description of Unknown:random_neg_ctrl neg_ctrl sequence

SEQ ID NO: 46232 - protein, 85 aa, unidentified
  REGION 1..85: note = Description of Unknown:random_neg_ctrl neg_ctrl sequence
LIFTQICPLERANYLFKEGRLKLAFIGKTGGYSHRVKLFLQPRFSKPIKQVNSPKRGHQISPDKKFLSSTCRNFAQGPRYENVSV

SEQ ID NO: 46233 - protein, 85 aa, unidentified; identical to SEQ ID NO: 14198
  REGION 1..85: note = Description of Unknown:random_neg_ctrl neg_ctrl sequence

SEQ ID NO: 46234 - protein, 85 aa, unidentified; identical to SEQ ID NO: 14199
  REGION 1..85: note = Description of Unknown:random_neg_ctrl neg_ctrl sequence

SEQ ID NO: 46235 - protein, 85 aa, unidentified; identical to SEQ ID NO: 14200
  REGION 1..85: note = Description of Unknown:random_neg_ctrl neg_ctrl sequence

SEQ ID NO: 46236 - protein, 85 aa, unidentified; identical to SEQ ID NO: 14201
  REGION 1..85: note = Description of Unknown:random_neg_ctrl neg_ctrl sequence

SEQ ID NO: 46237 - protein, 84 aa, unidentified; identical to SEQ ID NO: 14202
  REGION 1..84: note = Description of Unknown:random_neg_ctrl neg_ctrl sequence

SEQ ID NO: 46238 - protein, 85 aa, unidentified; identical to SEQ ID NO: 14203
  REGION 1..85: note = Description of Unknown:random_neg_ctrl neg_ctrl sequence

SEQ ID NO: 46239 - protein, 85 aa, unidentified; identical to SEQ ID NO: 14204
  REGION 1..85: note = Description of Unknown:random_neg_ctrl neg_ctrl sequence

SEQ ID NO: 46240 - protein, 84 aa, unidentified; identical to SEQ ID NO: 14205
  REGION 1..84: note = Description of Unknown:random_neg_ctrl neg_ctrl sequence

SEQ ID NO: 46241 - protein, 26 aa, unidentified
  REGION 1..26: note = Description of Unknown:random_neg_ctrl neg_ctrl sequence
AEVSQLSSGELEYEESELDLVVIVEK

SEQ ID NO: 46242 - protein, 80 aa, unidentified; identical to SEQ ID NO: 14207
  REGION 1..80: note = Description of Unknown:random_neg_ctrl neg_ctrl sequence

SEQ ID NO: 46243 - protein, 85 aa, unidentified; identical to SEQ ID NO: 14208
  REGION 1..85: note = Description of Unknown:random_neg_ctrl neg_ctrl sequence

SEQ ID NO: 46244 - protein, 85 aa, unidentified; identical to SEQ ID NO: 14209
  REGION 1..85: note = Description of Unknown:random_neg_ctrl neg_ctrl sequence

SEQ ID NO: 46245 - protein, 48 aa, unidentified
  REGION 1..48: note = Description of Unknown:random_neg_ctrl neg_ctrl sequence
LPDKCLEMPKFIHLTQQCVVIEKQESKFRRTVDINHNASEQVLVNCYI

SEQ ID NO: 46246 - protein, 85 aa, unidentified; identical to SEQ ID NO: 14211
  REGION 1..85: note = Description of Unknown:random_neg_ctrl neg_ctrl sequence

SEQ ID NO: 46247 - protein, 85 aa, unidentified; identical to SEQ ID NO: 14212
  REGION 1..85: note = Description of Unknown:random_neg_ctrl neg_ctrl sequence

SEQ ID NO: 46248 - protein, 85 aa, unidentified; identical to SEQ ID NO: 14213
  REGION 1..85: note = Description of Unknown:random_neg_ctrl neg_ctrl sequence

SEQ ID NO: 46249 - protein, 85 aa, unidentified; identical to SEQ ID NO: 14214
  REGION 1..85: note = Description of Unknown:random_neg_ctrl neg_ctrl sequence

SEQ ID NO: 46250 - protein, 85 aa, unidentified; identical to SEQ ID NO: 14215
  REGION 1..85: note = Description of Unknown:random_neg_ctrl neg_ctrl sequence

SEQ ID NO: 46251 - protein, 85 aa, unidentified; identical to SEQ ID NO: 14216
  REGION 1..85: note = Description of Unknown:random_neg_ctrl neg_ctrl sequence

SEQ ID NO: 46252 - protein, 85 aa, unidentified; identical to SEQ ID NO: 14217
  REGION 1..85: note = Description of Unknown:random_neg_ctrl neg_ctrl sequence

SEQ ID NO: 46253 - protein, 85 aa, unidentified; identical to SEQ ID NO: 14218
  REGION 1..85: note = Description of Unknown:random_neg_ctrl neg_ctrl sequence

SEQ ID NO: 46254 - protein, 85 aa, unidentified; identical to SEQ ID NO: 14219
  REGION 1..85: note = Description of Unknown:random_neg_ctrl neg_ctrl sequence

SEQ ID NO: 46255 - protein, 85 aa, unidentified; identical to SEQ ID NO: 14220
  REGION 1..85: note = Description of Unknown:random_neg_ctrl neg_ctrl sequence

SEQ ID NO: 46256 - protein, 32 aa, unidentified
  REGION 1..32: note = Description of Unknown:random_neg_ctrl neg_ctrl sequence
LVYWKSDAEAAAETKEATGCGNGYIPREHEFT

SEQ ID NO: 46257 - protein, 85 aa, unidentified; identical to SEQ ID NO: 14222
  REGION 1..85: note = Description of Unknown:random_neg_ctrl neg_ctrl sequence

SEQ ID NO: 46258 - protein, 85 aa, unidentified; identical to SEQ ID NO: 14223
  REGION 1..85: note = Description of Unknown:random_neg_ctrl neg_ctrl sequence

SEQ ID NO: 46259 - protein, 8 aa, unidentified
  REGION 1..8: note = Description of Unknown:random_neg_ctrl neg_ctrl sequence
TFVSEWWY

SEQ ID NO: 46260 - protein, 85 aa, unidentified; identical to SEQ ID NO: 14225
  REGION 1..85: note = Description of Unknown:random_neg_ctrl neg_ctrl sequence

SEQ ID NO: 46261 - protein, 83 aa, unidentified; identical to SEQ ID NO: 14226
  REGION 1..83: note = Description of Unknown:random_neg_ctrl neg_ctrl sequence

SEQ ID NO: 46262 - protein, 85 aa, unidentified; identical to SEQ ID NO: 14227
  REGION 1..85: note = Description of Unknown:random_neg_ctrl neg_ctrl sequence

SEQ ID NO: 46263 - protein, 85 aa, unidentified; identical to SEQ ID NO: 14228
  REGION 1..85: note = Description of Unknown:random_neg_ctrl neg_ctrl sequence

SEQ ID NO: 46264 - protein, 85 aa, unidentified; identical to SEQ ID NO: 14229
  REGION 1..85: note = Description of Unknown:random_neg_ctrl neg_ctrl sequence

SEQ ID NO: 46265 - protein, 20 aa, unidentified
  REGION 1..20: note = Description of Unknown:random_neg_ctrl neg_ctrl sequence
LCSITNKESIVCRNLHGECY

SEQ ID NO: 46266 - protein, 85 aa, unidentified; identical to SEQ ID NO: 14231
  REGION 1..85: note = Description of Unknown:random_neg_ctrl neg_ctrl sequence

SEQ ID NO: 46267 - protein, 85 aa, unidentified; identical to SEQ ID NO: 14232
  REGION 1..85: note = Description of Unknown:random_neg_ctrl neg_ctrl sequence

SEQ ID NO: 46268 - protein, 85 aa, unidentified; identical to SEQ ID NO: 14233
  REGION 1..85: note = Description of Unknown:random_neg_ctrl neg_ctrl sequence

SEQ ID NO: 46269 - protein, 85 aa, unidentified; identical to SEQ ID NO: 14234
  REGION 1..85: note = Description of Unknown:random_neg_ctrl neg_ctrl sequence

SEQ ID NO: 46270 - protein, 85 aa, unidentified; identical to SEQ ID NO: 14235
  REGION 1..85: note = Description of Unknown:random_neg_ctrl neg_ctrl sequence

SEQ ID NO: 46271 - protein, 61 aa, unidentified; identical to SEQ ID NO: 14236
  REGION 1..61: note = Description of Unknown:random_neg_ctrl neg_ctrl sequence

SEQ ID NO: 46272 - protein, 85 aa, unidentified; identical to SEQ ID NO: 14237
  REGION 1..85: note = Description of Unknown:random_neg_ctrl neg_ctrl sequence

SEQ ID NO: 46273 - protein, 85 aa, unidentified; identical to SEQ ID NO: 14238
  REGION 1..85: note = Description of Unknown:random_neg_ctrl neg_ctrl sequence

SEQ ID NO: 46274 - protein, 85 aa, unidentified
  REGION 1..85: note = Description of Unknown:random_neg_ctrl neg_ctrl sequence
LDFFGMKEILIAGTWECRPIKKEQDDRANPLEYHTLQDTHNCSISVDELSRPIADNDQSSTLLCVLKVENGAELSNLVSERLGLL

SEQ ID NO: 46275 - protein, 7 aa, unidentified
  REGION 1..7: note = Description of Unknown:random_neg_ctrl neg_ctrl sequence
LDKLFAM

SEQ ID NO: 46276 - protein, 85 aa, unidentified; identical to SEQ ID NO: 14241
  REGION 1..85: note = Description of Unknown:random_neg_ctrl neg_ctrl sequence

SEQ ID NO: 46277 - protein, 85 aa, unidentified
  REGION 1..85: note = Description of Unknown:random_neg_ctrl neg_ctrl sequence
LELCQGLRSLRRRELPLTLNWIEFCGLGEKQEDFAPTSSQLTERDPHQQTQGTPSGEAERPVFFKVRSNETHHQLDLRLPIEGCR

SEQ ID NO: 46278 - protein, 85 aa, unidentified; identical to SEQ ID NO: 14243
  REGION 1..85: note = Description of Unknown:random_neg_ctrl neg_ctrl sequence

SEQ ID NO: 46279 - protein, 85 aa, unidentified; identical to SEQ ID NO: 14244
  REGION 1..85: note = Description of Unknown:random_neg_ctrl neg_ctrl sequence

SEQ ID NO: 46280 - protein, 85 aa, unidentified; identical to SEQ ID NO: 14245
  REGION 1..85: note = Description of Unknown:random_neg_ctrl neg_ctrl sequence

SEQ ID NO: 46281 - protein, 85 aa, unidentified; identical to SEQ ID NO: 14246
  REGION 1..85: note = Description of Unknown:random_neg_ctrl neg_ctrl sequence

SEQ ID NO: 46282 - protein, 85 aa, unidentified
  REGION 1..85: note = Description of Unknown:random_neg_ctrl neg_ctrl sequence
LYTKSLTVGIPVNETSGHYPFSLLGGIWNQGANEKQQLFGKIELRGRLSPHELSPNCKSEKAVRFGSEERFGLAPLTLKAVAREH

SEQ ID NO: 46283 - protein, 85 aa, unidentified; identical to SEQ ID NO: 14248
  REGION 1..85: note = Description of Unknown:random_neg_ctrl neg_ctrl sequence

SEQ ID NO: 46284 - protein, 85 aa, unidentified
  REGION 1..85: note = Description of Unknown:random_neg_ctrl neg_ctrl sequence
LKEVVNPVSQSGNYSKVQECDHVIAQLSGSGCFFHRASTRKQAERQVQAELFSAHIEKVTEMSAHRAKPAPYWSNDSLLRGPLHV

SEQ ID NO: 46285 - protein, 82 aa, unidentified; identical to SEQ ID NO: 14250
  REGION 1..82: note = Description of Unknown:random_neg_ctrl neg_ctrl sequence

SEQ ID NO: 46286 - protein, 85 aa, unidentified; identical to SEQ ID NO: 14251
  REGION 1..85: note = Description of Unknown:random_neg_ctrl neg_ctrl sequence

SEQ ID NO: 46287 - protein, 85 aa, unidentified; identical to SEQ ID NO: 14252
  REGION 1..85: note = Description of Unknown:random_neg_ctrl neg_ctrl sequence

SEQ ID NO: 46288 - protein, 85 aa, unidentified; identical to SEQ ID NO: 14253
  REGION 1..85: note = Description of Unknown:random_neg_ctrl neg_ctrl sequence

SEQ ID NO: 46289 - protein, 85 aa, unidentified; identical to SEQ ID NO: 14254
  REGION 1..85: note = Description of Unknown:random_neg_ctrl neg_ctrl sequence

SEQ ID NO: 46290 - protein, 85 aa, unidentified; identical to SEQ ID NO: 14255
  REGION 1..85: note = Description of Unknown:random_neg_ctrl neg_ctrl sequence

SEQ ID NO: 46291 - protein, 85 aa, unidentified; identical to SEQ ID NO: 14256
  REGION 1..85: note = Description of Unknown:random_neg_ctrl neg_ctrl sequence

SEQ ID NO: 46292 - protein, 85 aa, unidentified; identical to SEQ ID NO: 14257
  REGION 1..85: note = Description of Unknown:random_neg_ctrl neg_ctrl sequence

SEQ ID NO: 46293 - protein, 85 aa, unidentified; identical to SEQ ID NO: 14258
  REGION 1..85: note = Description of Unknown:random_neg_ctrl neg_ctrl sequence

SEQ ID NO: 46294 - protein, 85 aa, unidentified; identical to SEQ ID NO: 14259
  REGION 1..85: note = Description of Unknown:random_neg_ctrl neg_ctrl sequence

SEQ ID NO: 46295 - protein, 85 aa, unidentified; identical to SEQ ID NO: 14260
  REGION 1..85: note = Description of Unknown:random_neg_ctrl neg_ctrl sequence

SEQ ID NO: 46296 - protein, 64 aa, unidentified; identical to SEQ ID NO: 14261
  REGION 1..64: note = Description of Unknown:random_neg_ctrl neg_ctrl sequence

SEQ ID NO: 46297 - protein, 85 aa, unidentified; identical to SEQ ID NO: 14262
  REGION 1..85: note = Description of Unknown:random_neg_ctrl neg_ctrl sequence

SEQ ID NO: 46298 - protein, 85 aa, unidentified; identical to SEQ ID NO: 14263
  REGION 1..85: note = Description of Unknown:random_neg_ctrl neg_ctrl sequence

SEQ ID NO: 46299 - protein, 85 aa, unidentified; identical to SEQ ID NO: 14264
  REGION 1..85: note = Description of Unknown:random_neg_ctrl neg_ctrl sequence

SEQ ID NO: 46300 - protein, 85 aa, unidentified; identical to SEQ ID NO: 14265
  REGION 1..85: note = Description of Unknown:random_neg_ctrl neg_ctrl sequence

SEQ ID NO: 46301 - protein, 85 aa, unidentified; identical to SEQ ID NO: 14266
  REGION 1..85: note = Description of Unknown:random_neg_ctrl neg_ctrl sequence

SEQ ID NO: 46302 - protein, 85 aa, unidentified; identical to SEQ ID NO: 14267
  REGION 1..85: note = Description of Unknown:random_neg_ctrl neg_ctrl sequence

SEQ ID NO: 46303 - protein, 85 aa, unidentified; identical to SEQ ID NO: 14268
  REGION 1..85: note = Description of Unknown:random_neg_ctrl neg_ctrl sequence

SEQ ID NO: 46304 - protein, 84 aa, unidentified; identical to SEQ ID NO: 14269
  REGION 1..84: note = Description of Unknown:random_neg_ctrl neg_ctrl sequence

SEQ ID NO: 46305 - protein, 85 aa, unidentified; identical to SEQ ID NO: 14270
  REGION 1..85: note = Description of Unknown:random_neg_ctrl neg_ctrl sequence

SEQ ID NO: 46306 - protein, 85 aa, unidentified; identical to SEQ ID NO: 14271
  REGION 1..85: note = Description of Unknown:random_neg_ctrl neg_ctrl sequence

SEQ ID NO: 46307 - protein, 85 aa, unidentified; identical to SEQ ID NO: 14272
  REGION 1..85: note = Description of Unknown:random_neg_ctrl neg_ctrl sequence

SEQ ID NO: 46308 - protein, 84 aa, unidentified; identical to SEQ ID NO: 14273
  REGION 1..84: note = Description of Unknown:random_neg_ctrl neg_ctrl sequence

SEQ ID NO: 46309 - protein, 85 aa, unidentified; identical to SEQ ID NO: 14274
  REGION 1..85: note = Description of Unknown:random_neg_ctrl neg_ctrl sequence

SEQ ID NO: 46310 - protein, 85 aa, unidentified; identical to SEQ ID NO: 14275
  REGION 1..85: note = Description of Unknown:random_neg_ctrl neg_ctrl sequence

SEQ ID NO: 46311 - protein, 85 aa, unidentified; identical to SEQ ID NO: 14276
  REGION 1..85: note = Description of Unknown:random_neg_ctrl neg_ctrl sequence

SEQ ID NO: 46312 - protein, 85 aa, unidentified; identical to SEQ ID NO: 14277
  REGION 1..85: note = Description of Unknown:random_neg_ctrl neg_ctrl sequence

SEQ ID NO: 46313 - protein, 85 aa, unidentified; identical to SEQ ID NO: 14278
  REGION 1..85: note = Description of Unknown:random_neg_ctrl neg_ctrl sequence

SEQ ID NO: 46314 - protein, 85 aa, unidentified; identical to SEQ ID NO: 14279
  REGION 1..85: note = Description of Unknown:random_neg_ctrl neg_ctrl sequence

SEQ ID NO: 46315 - protein, 85 aa, unidentified; identical to SEQ ID NO: 14280
  REGION 1..85: note = Description of Unknown:random_neg_ctrl neg_ctrl sequence

SEQ ID NO: 46316 - protein, 85 aa, unidentified
  REGION 1..85: note = Description of Unknown:random_neg_ctrl neg_ctrl sequence
LILRPGLAPVTVYAGPQGHEADKYEPDSQDTHPSLSGETQPSNLSIRDARVLQSVYLNLMYMLDEDEPKTSDSNGESNMGLALAQ

SEQ ID NO: 46317 - protein, 85 aa, unidentified; identical to SEQ ID NO: 14282
  REGION 1..85: note = Description of Unknown:random_neg_ctrl neg_ctrl sequence

SEQ ID NO: 46318 - protein, 85 aa, unidentified; identical to SEQ ID NO: 14283
  REGION 1..85: note = Description of Unknown:random_neg_ctrl neg_ctrl sequence

SEQ ID NO: 46319 - protein, 85 aa, unidentified; identical to SEQ ID NO: 14284
  REGION 1..85: note = Description of Unknown:random_neg_ctrl neg_ctrl sequence

SEQ ID NO: 46320 - protein, 85 aa, unidentified; identical to SEQ ID NO: 14285
  REGION 1..85: note = Description of Unknown:random_neg_ctrl neg_ctrl sequence

SEQ ID NO: 46321 - protein, 85 aa, unidentified
  REGION 1..85: note = Description of Unknown:random_neg_ctrl neg_ctrl sequence
LSCAENAQAANDLAVARRTSKAGWYQVVHCDSKNYEGDKFAQEEGVTPWRRNCPPAGARLLALKALFQGSRSRSSRLREDLGDVS

SEQ ID NO: 46322 - protein, 84 aa, unidentified; identical to SEQ ID NO: 14287
  REGION 1..84: note = Description of Unknown:random_neg_ctrl neg_ctrl sequence

SEQ ID NO: 46323 - protein, 55 aa, unidentified; identical to SEQ ID NO: 14288
  REGION 1..55: note = Description of Unknown:random_neg_ctrl neg_ctrl sequence

SEQ ID NO: 46324 - protein, 85 aa, unidentified; identical to SEQ ID NO: 14289
  REGION 1..85: note = Description of Unknown:random_neg_ctrl neg_ctrl sequence

SEQ ID NO: 46325 - protein, 85 aa, unidentified; identical to SEQ ID NO: 14290
  REGION 1..85: note = Description of Unknown:random_neg_ctrl neg_ctrl sequence

SEQ ID NO: 46326 - protein, 85 aa, unidentified; identical to SEQ ID NO: 14291
  REGION 1..85: note = Description of Unknown:random_neg_ctrl neg_ctrl sequence

SEQ ID NO: 46327 - protein, 85 aa, unidentified; identical to SEQ ID NO: 14292
  REGION 1..85: note = Description of Unknown:random_neg_ctrl neg_ctrl sequence

SEQ ID NO: 46328 - protein, 79 aa, unidentified; identical to SEQ ID NO: 14293
  REGION 1..79: note = Description of Unknown:random_neg_ctrl neg_ctrl sequence

SEQ ID NO: 46329 - protein, 20 aa, unidentified
  REGION 1..20: note = Description of Unknown:random_neg_ctrl neg_ctrl sequence
APSRVPGRLERDRGMLTWQT

SEQ ID NO: 46330 - protein, 85 aa, unidentified; identical to SEQ ID NO: 14295
  REGION 1..85: note = Description of Unknown:random_neg_ctrl neg_ctrl sequence

SEQ ID NO: 46331 - protein, 85 aa, unidentified; identical to SEQ ID NO: 14296
  REGION 1..85: note = Description of Unknown:random_neg_ctrl neg_ctrl sequence

SEQ ID NO: 46332 - protein, 85 aa, unidentified; identical to SEQ ID NO: 14297
  REGION 1..85: note = Description of Unknown:random_neg_ctrl neg_ctrl sequence

SEQ ID NO: 46333 - protein, 85 aa, unidentified; identical to SEQ ID NO: 14298
  REGION 1..85: note = Description of Unknown:random_neg_ctrl neg_ctrl sequence

SEQ ID NO: 46334 - protein, 85 aa, unidentified; identical to SEQ ID NO: 14299
  REGION 1..85: note = Description of Unknown:random_neg_ctrl neg_ctrl sequence

SEQ ID NO: 46335 - protein, 85 aa, unidentified; identical to SEQ ID NO: 14300
  REGION 1..85: note = Description of Unknown:random_neg_ctrl neg_ctrl sequence

SEQ ID NO: 46336 - protein, 85 aa, unidentified; identical to SEQ ID NO: 14301
  REGION 1..85: note = Description of Unknown:random_neg_ctrl neg_ctrl sequence

SEQ ID NO: 46337 - protein, 85 aa, unidentified; identical to SEQ ID NO: 14302
  REGION 1..85: note = Description of Unknown:random_neg_ctrl neg_ctrl sequence

SEQ ID NO: 46338 - protein, 85 aa, unidentified; identical to SEQ ID NO: 14303
  REGION 1..85: note = Description of Unknown:random_neg_ctrl neg_ctrl sequence

SEQ ID NO: 46339 - protein, 85 aa, unidentified; identical to SEQ ID NO: 14304
  REGION 1..85: note = Description of Unknown:random_neg_ctrl neg_ctrl sequence

SEQ ID NO: 46340 - protein, 85 aa, unidentified; identical to SEQ ID NO: 14305
  REGION 1..85: note = Description of Unknown:random_neg_ctrl neg_ctrl sequence

SEQ ID NO: 46341 - protein, 84 aa, unidentified; identical to SEQ ID NO: 14306
  REGION 1..84: note = Description of Unknown:random_neg_ctrl neg_ctrl sequence

SEQ ID NO: 46342 - protein, 85 aa, unidentified; identical to SEQ ID NO: 14307
  REGION 1..85: note = Description of Unknown:random_neg_ctrl neg_ctrl sequence

SEQ ID NO: 46343 - protein, 5 aa, unidentified
  REGION 1..5: note = Description of Unknown:random_neg_ctrl neg_ctrl sequence
EANLI

SEQ ID NO: 46344 - protein, 85 aa, unidentified; identical to SEQ ID NO: 14309
  REGION 1..85: note = Description of Unknown:random_neg_ctrl neg_ctrl sequence

SEQ ID NO: 46345 - protein, 85 aa, unidentified; identical to SEQ ID NO: 14310
  REGION 1..85: note = Description of Unknown:random_neg_ctrl neg_ctrl sequence

SEQ ID NO: 46346 - protein, 85 aa, unidentified; identical to SEQ ID NO: 14311
  REGION 1..85: note = Description of Unknown:random_neg_ctrl neg_ctrl sequence

SEQ ID NO: 46347 - protein, 85 aa, unidentified; identical to SEQ ID NO: 14312
  REGION 1..85: note = Description of Unknown:random_neg_ctrl neg_ctrl sequence

SEQ ID NO: 46348 - protein, 85 aa, unidentified; identical to SEQ ID NO: 14313
  REGION 1..85: note = Description of Unknown:random_neg_ctrl neg_ctrl sequence

SEQ ID NO: 46349 - protein, 85 aa, unidentified; identical to SEQ ID NO: 14314
  REGION 1..85: note = Description of Unknown:random_neg_ctrl neg_ctrl sequence

SEQ ID NO: 46350 - protein, 85 aa, unidentified; identical to SEQ ID NO: 14315
  REGION 1..85: note = Description of Unknown:random_neg_ctrl neg_ctrl sequence

SEQ ID NO: 46351 - protein, 85 aa, unidentified; identical to SEQ ID NO: 14316
  REGION 1..85: note = Description of Unknown:random_neg_ctrl neg_ctrl sequence

SEQ ID NO: 46352 - protein, 85 aa, unidentified; identical to SEQ ID NO: 14317
  REGION 1..85: note = Description of Unknown:random_neg_ctrl neg_ctrl sequence

SEQ ID NO: 46353 - protein, 85 aa, unidentified; identical to SEQ ID NO: 14318
  REGION 1..85: note = Description of Unknown:random_neg_ctrl neg_ctrl sequence

SEQ ID NO: 46354 - protein, 85 aa, unidentified; identical to SEQ ID NO: 14319
  REGION 1..85: note = Description of Unknown:random_neg_ctrl neg_ctrl sequence

SEQ ID NO: 46355 - protein, 20 aa, unidentified
  REGION 1..20: note = Description of Unknown:random_neg_ctrl neg_ctrl sequence
ERSAPCMPPDLEEVYRVGDS

SEQ ID NO: 46356 - protein, 84 aa, unidentified; identical to SEQ ID NO: 14321
  REGION 1..84: note = Description of Unknown:random_neg_ctrl neg_ctrl sequence

SEQ ID NO: 46357 - protein, 75 aa, unidentified; identical to SEQ ID NO: 14322
  REGION 1..75: note = Description of Unknown:random_neg_ctrl neg_ctrl sequence

SEQ ID NO: 46358 - protein, 85 aa, unidentified; identical to SEQ ID NO: 14323
  REGION 1..85: note = Description of Unknown:random_neg_ctrl neg_ctrl sequence

SEQ ID NO: 46359 - protein, 85 aa, unidentified; identical to SEQ ID NO: 14324
  REGION 1..85: note = Description of Unknown:random_neg_ctrl neg_ctrl sequence

SEQ ID NO: 46360 - protein, 85 aa, unidentified; identical to SEQ ID NO: 14325
  REGION 1..85: note = Description of Unknown:random_neg_ctrl neg_ctrl sequence

SEQ ID NO: 46361 - protein, 85 aa, unidentified; identical to SEQ ID NO: 14326
  REGION 1..85: note = Description of Unknown:random_neg_ctrl neg_ctrl sequence

SEQ ID NO: 46362 - protein, 85 aa, unidentified; identical to SEQ ID NO: 14327
  REGION 1..85: note = Description of Unknown:random_neg_ctrl neg_ctrl sequence

SEQ ID NO: 46363 - protein, 85 aa, unidentified
  REGION 1..85: note = Description of Unknown:random_neg_ctrl neg_ctrl sequence
LNERDDSPYQEGKHSSKMRLKDLFFDETTEGLALLPSAQPVLKPQRESRLRYPRADSHETSFAHYGWFEFDVDDEAHDAVPKDSV

SEQ ID NO: 46364 - protein, 85 aa, unidentified; identical to SEQ ID NO: 14329
  REGION 1..85: note = Description of Unknown:random_neg_ctrl neg_ctrl sequence

SEQ ID NO: 46365 - protein, 85 aa, unidentified
  REGION 1..85: note = Description of Unknown:random_neg_ctrl neg_ctrl sequence
LALYDLNLANEDGLGKQGPNRDKKNGVVNGSLNLSEVSTPVGRVSCLSDPGSQTRALLFDDELMLGIDSSSASPSGIEVDESLNS

SEQ ID NO: 46366 - protein, 85 aa, unidentified; identical to SEQ ID NO: 14331
  REGION 1..85: note = Description of Unknown:random_neg_ctrl neg_ctrl sequence

SEQ ID NO: 46367 - protein, 84 aa, unidentified; identical to SEQ ID NO: 14332
  REGION 1..84: note = Description of Unknown:random_neg_ctrl neg_ctrl sequence

SEQ ID NO: 46368 - protein, 85 aa, unidentified; identical to SEQ ID NO: 14333
  REGION 1..85: note = Description of Unknown:random_neg_ctrl neg_ctrl sequence

SEQ ID NO: 46369 - protein, 85 aa, unidentified; identical to SEQ ID NO: 14334
  REGION 1..85: note = Description of Unknown:random_neg_ctrl neg_ctrl sequence

SEQ ID NO: 46370 - protein, 85 aa, unidentified; identical to SEQ ID NO: 14335
  REGION 1..85: note = Description of Unknown:random_neg_ctrl neg_ctrl sequence

SEQ ID NO: 46371 - protein, 85 aa, unidentified; identical to SEQ ID NO: 14336
  REGION 1..85: note = Description of Unknown:random_neg_ctrl neg_ctrl sequence

SEQ ID NO: 46372 - protein, 6 aa, unidentified
  REGION 1..6: note = Description of Unknown:random_neg_ctrl neg_ctrl sequence
GTIQLS

SEQ ID NO: 46373 - protein, 85 aa, unidentified; identical to SEQ ID NO: 14338
  REGION 1..85: note = Description of Unknown:random_neg_ctrl neg_ctrl sequence

SEQ ID NO: 46374 - protein, 85 aa, unidentified; identical to SEQ ID NO: 14339
  REGION 1..85: note = Description of Unknown:random_neg_ctrl neg_ctrl sequence

SEQ ID NO: 46375 - protein, 85 aa, unidentified; identical to SEQ ID NO: 14340
  REGION 1..85: note = Description of Unknown:random_neg_ctrl neg_ctrl sequence

SEQ ID NO: 46376 - protein, 85 aa, unidentified; identical to SEQ ID NO: 14341
  REGION 1..85: note = Description of Unknown:random_neg_ctrl neg_ctrl sequence

SEQ ID NO: 46377 - protein, 85 aa, unidentified; identical to SEQ ID NO: 14342
  REGION 1..85: note = Description of Unknown:random_neg_ctrl neg_ctrl sequence

SEQ ID NO: 46378 - protein, 85 aa, unidentified; identical to SEQ ID NO: 14343
  REGION 1..85: note = Description of Unknown:random_neg_ctrl neg_ctrl sequence

SEQ ID NO: 46379 - protein, 84 aa, unidentified; identical to SEQ ID NO: 14344
  REGION 1..84: note = Description of Unknown:random_neg_ctrl neg_ctrl sequence

SEQ ID NO: 46380 - protein, 85 aa, unidentified; identical to SEQ ID NO: 14345
  REGION 1..85: note = Description of Unknown:random_neg_ctrl neg_ctrl sequence

SEQ ID NO: 46381 - protein, 85 aa, unidentified; identical to SEQ ID NO: 14346
  REGION 1..85: note = Description of Unknown:random_neg_ctrl neg_ctrl sequence

SEQ ID NO: 46382 - protein, 85 aa, unidentified
  REGION 1..85: note = Description of Unknown:random_neg_ctrl neg_ctrl sequence
LLEISIDERTTPSNPSVKHLGQPGKLIKKWFVEGWAPRSLDMKEAARKKGISKDHTTKTFLQLGSVPLTKEYCELKRLKRRGQEG

SEQ ID NO: 46383 - protein, 85 aa, unidentified; identical to SEQ ID NO: 14348
  REGION 1..85: note = Description of Unknown:random_neg_ctrl neg_ctrl sequence

SEQ ID NO: 46384 - protein, 85 aa, unidentified; identical to SEQ ID NO: 14349
  REGION 1..85: note = Description of Unknown:random_neg_ctrl neg_ctrl sequence

SEQ ID NO: 46385 - protein, 6 aa, unidentified
  REGION 1..6: note = Description of Unknown:random_neg_ctrl neg_ctrl sequence
FGKHDS

SEQ ID NO: 46386 - protein, 85 aa, unidentified; identical to SEQ ID NO: 14351
  REGION 1..85: note = Description of Unknown:random_neg_ctrl neg_ctrl sequence

SEQ ID NO: 46387 - protein, 85 aa, unidentified; identical to SEQ ID NO: 14352
  REGION 1..85: note = Description of Unknown:random_neg_ctrl neg_ctrl sequence

SEQ ID NO: 46388 - protein, 84 aa, unidentified; identical to SEQ ID NO: 14353
  REGION 1..84: note = Description of Unknown:random_neg_ctrl neg_ctrl sequence

SEQ ID NO: 46389 - protein, 51 aa, unidentified; identical to SEQ ID NO: 14354
  REGION 1..51: note = Description of Unknown:random_neg_ctrl neg_ctrl sequence

SEQ ID NO: 46390 - protein, 85 aa, unidentified; identical to SEQ ID NO: 14355
  REGION 1..85: note = Description of Unknown:random_neg_ctrl neg_ctrl sequence

SEQ ID NO: 46391 - protein, 65 aa, unidentified; identical to SEQ ID NO: 14356
  REGION 1..65: note = Description of Unknown:random_neg_ctrl neg_ctrl sequence

SEQ ID NO: 46392 - protein, 85 aa, unidentified; identical to SEQ ID NO: 14357
  REGION 1..85: note = Description of Unknown:random_neg_ctrl neg_ctrl sequence

SEQ ID NO: 46393 - protein, 85 aa, unidentified; identical to SEQ ID NO: 14358
  REGION 1..85: note = Description of Unknown:random_neg_ctrl neg_ctrl sequence

SEQ ID NO: 46394 - protein, 85 aa, unidentified; identical to SEQ ID NO: 14359
  REGION 1..85: note = Description of Unknown:random_neg_ctrl neg_ctrl sequence

SEQ ID NO: 46395 - protein, 49 aa, unidentified; identical to SEQ ID NO: 14360
  REGION 1..49: note = Description of Unknown:random_neg_ctrl neg_ctrl sequence

SEQ ID NO: 46396 - protein, 85 aa, unidentified; identical to SEQ ID NO: 14361
  REGION 1..85: note = Description of Unknown:random_neg_ctrl neg_ctrl sequence

SEQ ID NO: 46397 - protein, 85 aa, unidentified; identical to SEQ ID NO: 14362
  REGION 1..85: note = Description of Unknown:random_neg_ctrl neg_ctrl sequence

SEQ ID NO: 46398 - protein, 85 aa, unidentified; identical to SEQ ID NO: 14363
  REGION 1..85: note = Description of Unknown:random_neg_ctrl neg_ctrl sequence

SEQ ID NO: 46399 - protein, 85 aa, unidentified; identical to SEQ ID NO: 14364
  REGION 1..85: note = Description of Unknown:random_neg_ctrl neg_ctrl sequence

SEQ ID NO: 46400 - protein, 35 aa, unidentified; identical to SEQ ID NO: 14365
  REGION 1..35: note = Description of Unknown:random_neg_ctrl neg_ctrl sequence

SEQ ID NO: 46401 - protein, 69 aa, unidentified; identical to SEQ ID NO: 14366
  REGION 1..69: note = Description of Unknown:random_neg_ctrl neg_ctrl sequence

SEQ ID NO: 46402 - protein, 85 aa, unidentified; identical to SEQ ID NO: 14367
  REGION 1..85: note = Description of Unknown:random_neg_ctrl neg_ctrl sequence

SEQ ID NO: 46403 - protein, 85 aa, unidentified; identical to SEQ ID NO: 14368
  REGION 1..85: note = Description of Unknown:random_neg_ctrl neg_ctrl sequence

SEQ ID NO: 46404 - protein, 85 aa, unidentified
  REGION 1..85: note = Description of Unknown:random_neg_ctrl neg_ctrl sequence
LRELYSNHITAKSHLVEIFEGSTEDDLVFLLAVSMSTKTKQYFEYKHKRASKMGRITDILFKLLSASQPPHTLILIDKGLSTLSG

SEQ ID NO: 46405 - protein, 85 aa, unidentified; identical to SEQ ID NO: 14370
  REGION 1..85: note = Description of Unknown:random_neg_ctrl neg_ctrl sequence

SEQ ID NO: 46406 - protein, 85 aa, unidentified; identical to SEQ ID NO: 14371
  REGION 1..85: note = Description of Unknown:random_neg_ctrl neg_ctrl sequence

SEQ ID NO: 46407 - protein, 10 aa, unidentified
  REGION 1..10: note = Description of Unknown:random_neg_ctrl neg_ctrl sequence
LPLSKWDVVS

SEQ ID NO: 46408 - protein, 85 aa, unidentified; identical to SEQ ID NO: 14373
  REGION 1..85: note = Description of Unknown:random_neg_ctrl neg_ctrl sequence

SEQ ID NO: 46409 - protein, 85 aa, unidentified; identical to SEQ ID NO: 14374
  REGION 1..85: note = Description of Unknown:random_neg_ctrl neg_ctrl sequence

SEQ ID NO: 46410 - protein, 85 aa, unidentified; identical to SEQ ID NO: 14375
  REGION 1..85: note = Description of Unknown:random_neg_ctrl neg_ctrl sequence

SEQ ID NO: 46411 - protein, 85 aa, unidentified; identical to SEQ ID NO: 14376
  REGION 1..85: note = Description of Unknown:random_neg_ctrl neg_ctrl sequence

SEQ ID NO: 46412 - protein, 84 aa, unidentified; identical to SEQ ID NO: 14377
  REGION 1..84: note = Description of Unknown:random_neg_ctrl neg_ctrl sequence

SEQ ID NO: 46413 - protein, 85 aa, unidentified; identical to SEQ ID NO: 14378
  REGION 1..85: note = Description of Unknown:random_neg_ctrl neg_ctrl sequence

SEQ ID NO: 46414 - protein, 71 aa, unidentified; identical to SEQ ID NO: 14379
  REGION 1..71: note = Description of Unknown:random_neg_ctrl neg_ctrl sequence

SEQ ID NO: 46415 - protein, 85 aa, unidentified; identical to SEQ ID NO: 14380
  REGION 1..85: note = Description of Unknown:random_neg_ctrl neg_ctrl sequence

SEQ ID NO: 46416 - protein, 85 aa, unidentified; identical to SEQ ID NO: 14381
  REGION 1..85: note = Description of Unknown:random_neg_ctrl neg_ctrl sequence

SEQ ID NO: 46417 - protein, 75 aa, unidentified; identical to SEQ ID NO: 14382
  REGION 1..75: note = Description of Unknown:random_neg_ctrl neg_ctrl sequence

SEQ ID NO: 46418 - protein, 85 aa, unidentified; identical to SEQ ID NO: 14383
  REGION 1..85: note = Description of Unknown:random_neg_ctrl neg_ctrl sequence

SEQ ID NO: 46419 - protein, 85 aa, unidentified; identical to SEQ ID NO: 14384
  REGION 1..85: note = Description of Unknown:random_neg_ctrl neg_ctrl sequence

SEQ ID NO: 46420 - protein, 85 aa, unidentified; identical to SEQ ID NO: 14385
  REGION 1..85: note = Description of Unknown:random_neg_ctrl neg_ctrl sequence

SEQ ID NO: 46421 - protein, 22 aa, unidentified
  REGION 1..22: note = Description of Unknown:random_neg_ctrl neg_ctrl sequence
QDILNNEFPEIPEREIRPSSRE

SEQ ID NO: 46422 - protein, 85 aa, unidentified; identical to SEQ ID NO: 14387
  REGION 1..85: note = Description of Unknown:random_neg_ctrl neg_ctrl sequence

SEQ ID NO: 46423 - protein, 85 aa, unidentified; identical to SEQ ID NO: 14388
  REGION 1..85: note = Description of Unknown:random_neg_ctrl neg_ctrl sequence

SEQ ID NO: 46424 - protein, 85 aa, unidentified; identical to SEQ ID NO: 14389
  REGION 1..85: note = Description of Unknown:random_neg_ctrl neg_ctrl sequence

SEQ ID NO: 46425 - protein, 85 aa, unidentified; identical to SEQ ID NO: 14390
  REGION 1..85: note = Description of Unknown:random_neg_ctrl neg_ctrl sequence

SEQ ID NO: 46426 - protein, 85 aa, unidentified; identical to SEQ ID NO: 14391
  REGION 1..85: note = Description of Unknown:random_neg_ctrl neg_ctrl sequence

SEQ ID NO: 46427 - protein, 85 aa, unidentified; identical to SEQ ID NO: 14392
  REGION 1..85: note = Description of Unknown:random_neg_ctrl neg_ctrl sequence

SEQ ID NO: 46428 - protein, 85 aa, unidentified; identical to SEQ ID NO: 14393
  REGION 1..85: note = Description of Unknown:random_neg_ctrl neg_ctrl sequence

SEQ ID NO: 46429 - protein, 85 aa, unidentified; identical to SEQ ID NO: 14394
  REGION 1..85: note = Description of Unknown:random_neg_ctrl neg_ctrl sequence

SEQ ID NO: 46430 - protein, 85 aa, unidentified; identical to SEQ ID NO: 14395
  REGION 1..85: note = Description of Unknown:random_neg_ctrl neg_ctrl sequence

SEQ ID NO: 46431 - protein, 85 aa, unidentified; identical to SEQ ID NO: 14396
  REGION 1..85: note = Description of Unknown:random_neg_ctrl neg_ctrl sequence

SEQ ID NO: 46432 - protein, 85 aa, unidentified
  REGION 1..85: note = Description of Unknown:random_neg_ctrl neg_ctrl sequence
LRQTKSVDSYSKSLEKTEKGKSWFDTRFPTMLKPSGKFRDELREQESRDSVQLSRLCLAPKIKCKTSDIWLQFVLSYVLCPTILF

SEQ ID NO: 46433 - protein, 85 aa, unidentified; identical to SEQ ID NO: 14398
  REGION 1..85: note = Description of Unknown:random_neg_ctrl neg_ctrl sequence

SEQ ID NO: 46434 - protein, 85 aa, unidentified; identical to SEQ ID NO: 14399
  REGION 1..85: note = Description of Unknown:random_neg_ctrl neg_ctrl sequence

SEQ ID NO: 46435 - protein, 73 aa, unidentified; identical to SEQ ID NO: 14400
  REGION 1..73: note = Description of Unknown:random_neg_ctrl neg_ctrl sequence

SEQ ID NO: 46436 - protein, 85 aa, unidentified; identical to SEQ ID NO: 14401
  REGION 1..85: note = Description of Unknown:random_neg_ctrl neg_ctrl sequence

SEQ ID NO: 46437 - protein, 85 aa, unidentified; identical to SEQ ID NO: 14402
  REGION 1..85: note = Description of Unknown:random_neg_ctrl neg_ctrl sequence

SEQ ID NO: 46438 - protein, 85 aa, unidentified; identical to SEQ ID NO: 14403
  REGION 1..85: note = Description of Unknown:random_neg_ctrl neg_ctrl sequence

SEQ ID NO: 46439 - protein, 85 aa, unidentified; identical to SEQ ID NO: 14404
  REGION 1..85: note = Description of Unknown:random_neg_ctrl neg_ctrl sequence

SEQ ID NO: 46440 - protein, 84 aa, unidentified; identical to SEQ ID NO: 14405
  REGION 1..84: note = Description of Unknown:random_neg_ctrl neg_ctrl sequence

SEQ ID NO: 46441 - protein, 29 aa, unidentified
  REGION 1..29: note = Description of Unknown:random_neg_ctrl neg_ctrl sequence
DDLYHNSKDEESIEAGKDAPVKVHHAVVG

SEQ ID NO: 46442 - protein, 85 aa, unidentified; identical to SEQ ID NO: 14407
  REGION 1..85: note = Description of Unknown:random_neg_ctrl neg_ctrl sequence

SEQ ID NO: 46443 - protein, 85 aa, unidentified; identical to SEQ ID NO: 14408
  REGION 1..85: note = Description of Unknown:random_neg_ctrl neg_ctrl sequence

SEQ ID NO: 46444 - protein, 85 aa, unidentified; identical to SEQ ID NO: 14409
  REGION 1..85: note = Description of Unknown:random_neg_ctrl neg_ctrl sequence

SEQ ID NO: 46445 - protein, 84 aa, unidentified; identical to SEQ ID NO: 14410
  REGION 1..84: note = Description of Unknown:random_neg_ctrl neg_ctrl sequence

SEQ ID NO: 46446 - protein, 85 aa, unidentified; identical to SEQ ID NO: 14411
  REGION 1..85: note = Description of Unknown:random_neg_ctrl neg_ctrl sequence

SEQ ID NO: 46447 - protein, 12 aa, unidentified
  REGION 1..12: note = Description of Unknown:random_neg_ctrl neg_ctrl sequence
GESVVVDATDAS

SEQ ID NO: 46448 - protein, 85 aa, unidentified; identical to SEQ ID NO: 14413
  REGION 1..85: note = Description of Unknown:random_neg_ctrl neg_ctrl sequence

SEQ ID NO: 46449 - protein, 84 aa, unidentified; identical to SEQ ID NO: 14414
  REGION 1..84: note = Description of Unknown:random_neg_ctrl neg_ctrl sequence

SEQ ID NO: 46450 - protein, 85 aa, unidentified; identical to SEQ ID NO: 14415
  REGION 1..85: note = Description of Unknown:random_neg_ctrl neg_ctrl sequence

SEQ ID NO: 46451 - protein, 85 aa, unidentified
  REGION 1..85: note = Description of Unknown:random_neg_ctrl neg_ctrl sequence
LVEGKEADKKGVEGSAMGQKIMANNCPMAKPLVSNSRPTAPPEHMLLTFSTALPRLAESVLFVDRPKAGGRGQTLQPPKLRCWLR

SEQ ID NO: 46452 - protein, 85 aa, unidentified; identical to SEQ ID NO: 14417
  REGION 1..85: note = Description of Unknown:random_neg_ctrl neg_ctrl sequence

SEQ ID NO: 46453 - protein, 85 aa, unidentified; identical to SEQ ID NO: 14418
  REGION 1..85: note = Description of Unknown:random_neg_ctrl neg_ctrl sequence

SEQ ID NO: 46454 - protein, 85 aa, unidentified; identical to SEQ ID NO: 14419
  REGION 1..85: note = Description of Unknown:random_neg_ctrl neg_ctrl sequence

SEQ ID NO: 46455 - protein, 85 aa, unidentified; identical to SEQ ID NO: 14420
  REGION 1..85: note = Description of Unknown:random_neg_ctrl neg_ctrl sequence

SEQ ID NO: 46456 - protein, 84 aa, unidentified; identical to SEQ ID NO: 14421
  REGION 1..84: note = Description of Unknown:random_neg_ctrl neg_ctrl sequence

SEQ ID NO: 46457 - protein, 85 aa, unidentified; identical to SEQ ID NO: 14422
  REGION 1..85: note = Description of Unknown:random_neg_ctrl neg_ctrl sequence

SEQ ID NO: 46458 - protein, 85 aa, unidentified; identical to SEQ ID NO: 14423
  REGION 1..85: note = Description of Unknown:random_neg_ctrl neg_ctrl sequence

SEQ ID NO: 46459 - protein, 85 aa, unidentified; identical to SEQ ID NO: 14424
  REGION 1..85: note = Description of Unknown:random_neg_ctrl neg_ctrl sequence

SEQ ID NO: 46460 - protein, 85 aa, unidentified; identical to SEQ ID NO: 14425
  REGION 1..85: note = Description of Unknown:random_neg_ctrl neg_ctrl sequence

SEQ ID NO: 46461 - protein, 85 aa, unidentified; identical to SEQ ID NO: 14426
  REGION 1..85: note = Description of Unknown:random_neg_ctrl neg_ctrl sequence

SEQ ID NO: 46462 - protein, 85 aa, unidentified; identical to SEQ ID NO: 14427
  REGION 1..85: note = Description of Unknown:random_neg_ctrl neg_ctrl sequence

SEQ ID NO: 46463 - protein, 85 aa, unidentified; identical to SEQ ID NO: 14428
  REGION 1..85: note = Description of Unknown:random_neg_ctrl neg_ctrl sequence

SEQ ID NO: 46464 - protein, 85 aa, unidentified; identical to SEQ ID NO: 14429
  REGION 1..85: note = Description of Unknown:random_neg_ctrl neg_ctrl sequence

SEQ ID NO: 46465 - protein, 84 aa, unidentified; identical to SEQ ID NO: 14430
  REGION 1..84: note = Description of Unknown:random_neg_ctrl neg_ctrl sequence

SEQ ID NO: 46466 - protein, 85 aa, unidentified; identical to SEQ ID NO: 14431
  REGION 1..85: note = Description of Unknown:random_neg_ctrl neg_ctrl sequence

SEQ ID NO: 46467 - protein, 84 aa, unidentified; identical to SEQ ID NO: 14432
  REGION 1..84: note = Description of Unknown:random_neg_ctrl neg_ctrl sequence

SEQ ID NO: 46468 - protein, 85 aa, unidentified; identical to SEQ ID NO: 14433
  REGION 1..85: note = Description of Unknown:random_neg_ctrl neg_ctrl sequence

SEQ ID NO: 46469 - protein, 85 aa, unidentified; identical to SEQ ID NO: 14434
  REGION 1..85: note = Description of Unknown:random_neg_ctrl neg_ctrl sequence

SEQ ID NO: 46470 - protein, 85 aa, unidentified; identical to SEQ ID NO: 14435
  REGION 1..85: note = Description of Unknown:random_neg_ctrl neg_ctrl sequence

SEQ ID NO: 46471 - protein, 84 aa, unidentified; identical to SEQ ID NO: 14436
  REGION 1..84: note = Description of Unknown:random_neg_ctrl neg_ctrl sequence

SEQ ID NO: 46472 - protein, 85 aa, unidentified; identical to SEQ ID NO: 14437
  REGION 1..85: note = Description of Unknown:random_neg_ctrl neg_ctrl sequence

SEQ ID NO: 46473 - protein, 85 aa, unidentified; identical to SEQ ID NO: 14438
  REGION 1..85: note = Description of Unknown:random_neg_ctrl neg_ctrl sequence

SEQ ID NO: 46474 - protein, 15 aa, unidentified
  REGION 1..15: note = Description of Unknown:random_neg_ctrl neg_ctrl sequence
LERSHFRKLRTSATK

SEQ ID NO: 46475 - protein, 85 aa, unidentified; identical to SEQ ID NO: 14440
  REGION 1..85: note = Description of Unknown:random_neg_ctrl neg_ctrl sequence

SEQ ID NO: 46476 - protein, 85 aa, unidentified; identical to SEQ ID NO: 14441
  REGION 1..85: note = Description of Unknown:random_neg_ctrl neg_ctrl sequence

SEQ ID NO: 46477 - protein, 85 aa, unidentified; identical to SEQ ID NO: 14442
  REGION 1..85: note = Description of Unknown:random_neg_ctrl neg_ctrl sequence

SEQ ID NO: 46478 - protein, 85 aa, unidentified; identical to SEQ ID NO: 14443
  REGION 1..85: note = Description of Unknown:random_neg_ctrl neg_ctrl sequence

SEQ ID NO: 46479 - protein, 85 aa, unidentified; identical to SEQ ID NO: 14444
  REGION 1..85: note = Description of Unknown:random_neg_ctrl neg_ctrl sequence

SEQ ID NO: 46480 - protein, 85 aa, unidentified; identical to SEQ ID NO: 14445
  REGION 1..85: note = Description of Unknown:random_neg_ctrl neg_ctrl sequence

SEQ ID NO: 46481 - protein, 44 aa, unidentified; identical to SEQ ID NO: 14446
  REGION 1..44: note = Description of Unknown:random_neg_ctrl neg_ctrl sequence

SEQ ID NO: 46482 - protein, 85 aa, unidentified; identical to SEQ ID NO: 14447
  REGION 1..85: note = Description of Unknown:random_neg_ctrl neg_ctrl sequence

SEQ ID NO: 46483 - protein, 85 aa, unidentified; identical to SEQ ID NO: 14448
  REGION 1..85: note = Description of Unknown:random_neg_ctrl neg_ctrl sequence

SEQ ID NO: 46484 - protein, 48 aa, unidentified; identical to SEQ ID NO: 14449
  REGION 1..48: note = Description of Unknown:random_neg_ctrl neg_ctrl sequence

SEQ ID NO: 46485 - protein, 85 aa, unidentified; identical to SEQ ID NO: 14450
  REGION 1..85: note = Description of Unknown:random_neg_ctrl neg_ctrl sequence

SEQ ID NO: 46486 - protein, 85 aa, unidentified; identical to SEQ ID NO: 14451
  REGION 1..85: note = Description of Unknown:random_neg_ctrl neg_ctrl sequence

SEQ ID NO: 46487 - protein, 35 aa, unidentified; identical to SEQ ID NO: 14452
  REGION 1..35: note = Description of Unknown:random_neg_ctrl neg_ctrl sequence

SEQ ID NO: 46488 - protein, 84 aa, unidentified; identical to SEQ ID NO: 14453
  REGION 1..84: note = Description of Unknown:random_neg_ctrl neg_ctrl sequence

SEQ ID NO: 46489 - protein, 85 aa, unidentified; identical to SEQ ID NO: 14454
  REGION 1..85: note = Description of Unknown:random_neg_ctrl neg_ctrl sequence

SEQ ID NO: 46490 - protein, 32 aa, unidentified; identical to SEQ ID NO: 14455
  REGION 1..32: note = Description of Unknown:random_neg_ctrl neg_ctrl sequence

SEQ ID NO: 46491 - protein, 85 aa, unidentified; identical to SEQ ID NO: 14456
  REGION 1..85: note = Description of Unknown:random_neg_ctrl neg_ctrl sequence

SEQ ID NO: 46492 - protein, 85 aa, unidentified; identical to SEQ ID NO: 14457
  REGION 1..85: note = Description of Unknown:random_neg_ctrl neg_ctrl sequence

SEQ ID NO: 46493 - protein, 85 aa, unidentified; identical to SEQ ID NO: 14458
  REGION 1..85: note = Description of Unknown:random_neg_ctrl neg_ctrl sequence

SEQ ID NO: 46494 - protein, 84 aa, unidentified; identical to SEQ ID NO: 14459
  REGION 1..84: note = Description of Unknown:random_neg_ctrl neg_ctrl sequence

SEQ ID NO: 46495 - protein, 84 aa, unidentified; identical to SEQ ID NO: 14460
  REGION 1..84: note = Description of Unknown:random_neg_ctrl neg_ctrl sequence

SEQ ID NO: 46496 - protein, 85 aa, unidentified; identical to SEQ ID NO: 14461
  REGION 1..85: note = Description of Unknown:random_neg_ctrl neg_ctrl sequence

SEQ ID NO: 46497 - protein, 84 aa, unidentified; identical to SEQ ID NO: 14462
  REGION 1..84: note = Description of Unknown:random_neg_ctrl neg_ctrl sequence

SEQ ID NO: 46498 - protein, 84 aa, unidentified; identical to SEQ ID NO: 14463
  REGION 1..84: note = Description of Unknown:random_neg_ctrl neg_ctrl sequence

SEQ ID NO: 46499 - protein, 85 aa, unidentified; identical to SEQ ID NO: 14464
  REGION 1..85: note = Description of Unknown:random_neg_ctrl neg_ctrl sequence

SEQ ID NO: 46500 - protein, 85 aa, unidentified; identical to SEQ ID NO: 14465
  REGION 1..85: note = Description of Unknown:random_neg_ctrl neg_ctrl sequence

SEQ ID NO: 46501 - protein, 85 aa, unidentified; identical to SEQ ID NO: 14466
  REGION 1..85: note = Description of Unknown:random_neg_ctrl neg_ctrl sequence

SEQ ID NO: 46502 - protein, 85 aa, unidentified; identical to SEQ ID NO: 14467
  REGION 1..85: note = Description of Unknown:random_neg_ctrl neg_ctrl sequence

SEQ ID NO: 46503 - protein, 85 aa, unidentified; identical to SEQ ID NO: 14468
  REGION 1..85: note = Description of Unknown:random_neg_ctrl neg_ctrl sequence

SEQ ID NO: 46504 - protein, 85 aa, unidentified; identical to SEQ ID NO: 14469
  REGION 1..85: note = Description of Unknown:random_neg_ctrl neg_ctrl sequence

SEQ ID NO: 46505 - protein, 85 aa, unidentified; identical to SEQ ID NO: 14470
  REGION 1..85: note = Description of Unknown:random_neg_ctrl neg_ctrl sequence

SEQ ID NO: 46506 - protein, 85 aa, unidentified
  REGION 1..85: note = Description of Unknown:random_neg_ctrl neg_ctrl sequence
LLSRHSFMILAHGNSLSDERQDSQSGKVGFGTSSEVITSTCEKFYVQRSLLHNAYQLGLLFARKEDTNSIFMRKFMKEEQRIQNS

SEQ ID NO: 46507 - protein, 85 aa, unidentified; identical to SEQ ID NO: 14472
  REGION 1..85: note = Description of Unknown:random_neg_ctrl neg_ctrl sequence

SEQ ID NO: 46508 - protein, 85 aa, unidentified; identical to SEQ ID NO: 14473
  REGION 1..85: note = Description of Unknown:random_neg_ctrl neg_ctrl sequence

SEQ ID NO: 46509 - protein, 85 aa, unidentified; identical to SEQ ID NO: 14474
  REGION 1..85: note = Description of Unknown:random_neg_ctrl neg_ctrl sequence

SEQ ID NO: 46510 - protein, 30 aa, unidentified; identical to SEQ ID NO: 14475
  REGION 1..30: note = Description of Unknown:random_neg_ctrl neg_ctrl sequence

SEQ ID NO: 46511 - protein, 84 aa, unidentified; identical to SEQ ID NO: 14476
  REGION 1..84: note = Description of Unknown:random_neg_ctrl neg_ctrl sequence

SEQ ID NO: 46512 - protein, 19 aa, unidentified
  REGION 1..19: note = Description of Unknown:random_neg_ctrl neg_ctrl sequence
MQRVASELCLASLDAAMTA

SEQ ID NO: 46513 - protein, 85 aa, unidentified; identical to SEQ ID NO: 14478
  REGION 1..85: note = Description of Unknown:random_neg_ctrl neg_ctrl sequence

SEQ ID NO: 46514 - protein, 38 aa, unidentified; identical to SEQ ID NO: 14479
  REGION 1..38: note = Description of Unknown:random_neg_ctrl neg_ctrl sequence

SEQ ID NO: 46515 - protein, 85 aa, unidentified; identical to SEQ ID NO: 14480
  REGION 1..85: note = Description of Unknown:random_neg_ctrl neg_ctrl sequence

SEQ ID NO: 46516 - protein, 85 aa, unidentified; identical to SEQ ID NO: 14481
  REGION 1..85: note = Description of Unknown:random_neg_ctrl neg_ctrl sequence

SEQ ID NO: 46517 - protein, 84 aa, unidentified; identical to SEQ ID NO: 14482
  REGION 1..84: note = Description of Unknown:random_neg_ctrl neg_ctrl sequence

SEQ ID NO: 46518 - protein, 85 aa, unidentified; identical to SEQ ID NO: 14483
  REGION 1..85: note = Description of Unknown:random_neg_ctrl neg_ctrl sequence

SEQ ID NO: 46519 - protein, 85 aa, unidentified; identical to SEQ ID NO: 14484
  REGION 1..85: note = Description of Unknown:random_neg_ctrl neg_ctrl sequence

SEQ ID NO: 46520 - protein, 85 aa, unidentified; identical to SEQ ID NO: 14485
  REGION 1..85: note = Description of Unknown:random_neg_ctrl neg_ctrl sequence

SEQ ID NO: 46521 - protein, 6 aa, unidentified
  REGION 1..6: note = Description of Unknown:random_neg_ctrl neg_ctrl sequence
PTYVPE

SEQ ID NO: 46522 - protein, 85 aa, unidentified; identical to SEQ ID NO: 14487
  REGION 1..85: note = Description of Unknown:random_neg_ctrl neg_ctrl sequence

SEQ ID NO: 46523 - protein, 85 aa, unidentified; identical to SEQ ID NO: 14488
  REGION 1..85: note = Description of Unknown:random_neg_ctrl neg_ctrl sequence

SEQ ID NO: 46524 - protein, 38 aa, unidentified; identical to SEQ ID NO: 14489
  REGION 1..38: note = Description of Unknown:random_neg_ctrl neg_ctrl sequence

SEQ ID NO: 46525 - protein, 85 aa, unidentified; identical to SEQ ID NO: 14490
  REGION 1..85: note = Description of Unknown:random_neg_ctrl neg_ctrl sequence

SEQ ID NO: 46526 - protein, 85 aa, unidentified; identical to SEQ ID NO: 14491
  REGION 1..85: note = Description of Unknown:random_neg_ctrl neg_ctrl sequence

SEQ ID NO: 46527 - protein, 85 aa, unidentified; identical to SEQ ID NO: 14492
  REGION 1..85: note = Description of Unknown:random_neg_ctrl neg_ctrl sequence

SEQ ID NO: 46528 - protein, 85 aa, unidentified; identical to SEQ ID NO: 14493
  REGION 1..85: note = Description of Unknown:random_neg_ctrl neg_ctrl sequence

SEQ ID NO: 46529 - protein, 85 aa, unidentified; identical to SEQ ID NO: 14494
  REGION 1..85: note = Description of Unknown:random_neg_ctrl neg_ctrl sequence

SEQ ID NO: 46530 - protein, 84 aa, unidentified; identical to SEQ ID NO: 14495
  REGION 1..84: note = Description of Unknown:random_neg_ctrl neg_ctrl sequence

SEQ ID NO: 46531 - protein, 85 aa, unidentified; identical to SEQ ID NO: 14496
  REGION 1..85: note = Description of Unknown:random_neg_ctrl neg_ctrl sequence

SEQ ID NO: 46532 - protein, 85 aa, unidentified; identical to SEQ ID NO: 14497
  REGION 1..85: note = Description of Unknown:random_neg_ctrl neg_ctrl sequence

SEQ ID NO: 46533 - protein, 85 aa, unidentified; identical to SEQ ID NO: 14498
  REGION 1..85: note = Description of Unknown:random_neg_ctrl neg_ctrl sequence

SEQ ID NO: 46534 - protein, 85 aa, unidentified; identical to SEQ ID NO: 14499
  REGION 1..85: note = Description of Unknown:random_neg_ctrl neg_ctrl sequence

SEQ ID NO: 46535 - protein, 50 aa, unidentified; identical to SEQ ID NO: 14500
  REGION 1..50: note = Description of Unknown:random_neg_ctrl neg_ctrl sequence

SEQ ID NO: 46536 - protein, 85 aa, unidentified; identical to SEQ ID NO: 14501
  REGION 1..85: note = Description of Unknown:random_neg_ctrl neg_ctrl sequence

SEQ ID NO: 46537 - protein, 85 aa, unidentified; identical to SEQ ID NO: 14502
  REGION 1..85: note = Description of Unknown:random_neg_ctrl neg_ctrl sequence

SEQ ID NO: 46538 - protein, 85 aa, unidentified; identical to SEQ ID NO: 14503
  REGION 1..85: note = Description of Unknown:random_neg_ctrl neg_ctrl sequence

SEQ ID NO: 46539 - protein, 83 aa, unidentified; identical to SEQ ID NO: 14504
  REGION 1..83: note = Description of Unknown:random_neg_ctrl neg_ctrl sequence

SEQ ID NO: 46540 - protein, 85 aa, unidentified; identical to SEQ ID NO: 14505
  REGION 1..85: note = Description of Unknown:random_neg_ctrl neg_ctrl sequence

SEQ ID NO: 46541 - protein, 85 aa, unidentified; identical to SEQ ID NO: 14506
  REGION 1..85: note = Description of Unknown:random_neg_ctrl neg_ctrl sequence

SEQ ID NO: 46542 - protein, 85 aa, unidentified; identical to SEQ ID NO: 14507
  REGION 1..85: note = Description of Unknown:random_neg_ctrl neg_ctrl sequence

SEQ ID NO: 46543 - protein, 85 aa, unidentified; identical to SEQ ID NO: 14508
  REGION 1..85: note = Description of Unknown:random_neg_ctrl neg_ctrl sequence

SEQ ID NO: 46544 - protein, 85 aa, unidentified; identical to SEQ ID NO: 14509
  REGION 1..85: note = Description of Unknown:random_neg_ctrl neg_ctrl sequence

SEQ ID NO: 46545 - protein, 85 aa, unidentified; identical to SEQ ID NO: 14510
  REGION 1..85: note = Description of Unknown:random_neg_ctrl neg_ctrl sequence

SEQ ID NO: 46546 - protein, 85 aa, unidentified; identical to SEQ ID NO: 14511
  REGION 1..85: note = Description of Unknown:random_neg_ctrl neg_ctrl sequence

SEQ ID NO: 46547 - protein, 85 aa, unidentified; identical to SEQ ID NO: 14512
  REGION 1..85: note = Description of Unknown:random_neg_ctrl neg_ctrl sequence

SEQ ID NO: 46548 - protein, 85 aa, unidentified; identical to SEQ ID NO: 14513
  REGION 1..85: note = Description of Unknown:random_neg_ctrl neg_ctrl sequence

SEQ ID NO: 46549 - protein, 85 aa, unidentified; identical to SEQ ID NO: 14514
  REGION 1..85: note = Description of Unknown:random_neg_ctrl neg_ctrl sequence

SEQ ID NO: 46550 - protein, 85 aa, unidentified; identical to SEQ ID NO: 14515
  REGION 1..85: note = Description of Unknown:random_neg_ctrl neg_ctrl sequence

SEQ ID NO: 46551 - protein, 85 aa, unidentified; identical to SEQ ID NO: 14516
  REGION 1..85: note = Description of Unknown:random_neg_ctrl neg_ctrl sequence

SEQ ID NO: 46552 - protein, 18 aa, unidentified
  REGION 1..18: note = Description of Unknown:random_neg_ctrl neg_ctrl sequence
VCNGQQNHILDGSPSDLP

SEQ ID NO: 46553 - protein, 85 aa, unidentified; identical to SEQ ID NO: 14518
  REGION 1..85: note = Description of Unknown:random_neg_ctrl neg_ctrl sequence

SEQ ID NO: 46554 - protein, 27 aa, unidentified
  REGION 1..27: note = Description of Unknown:random_neg_ctrl neg_ctrl sequence
ASEKTKALNKVNPHIMNPYLESTGKCD

SEQ ID NO: 46555 - protein, 75 aa, unidentified; identical to SEQ ID NO: 14520
  REGION 1..75: note = Description of Unknown:random_neg_ctrl neg_ctrl sequence

SEQ ID NO: 46556 - protein, 85 aa, unidentified; identical to SEQ ID NO: 14521
  REGION 1..85: note = Description of Unknown:random_neg_ctrl neg_ctrl sequence

SEQ ID NO: 46557 - protein, 85 aa, unidentified; identical to SEQ ID NO: 14522
  REGION 1..85: note = Description of Unknown:random_neg_ctrl neg_ctrl sequence

SEQ ID NO: 46558 - protein, 46 aa, unidentified; identical to SEQ ID NO: 14523
  REGION 1..46: note = Description of Unknown:random_neg_ctrl neg_ctrl sequence

SEQ ID NO: 46559 - protein, 28 aa, unidentified
  REGION 1..28: note = Description of Unknown:random_neg_ctrl neg_ctrl sequence
EDVVESIGKQNSILAYTSTSFPGTCIVL

SEQ ID NO: 46560 - protein, 85 aa, unidentified; identical to SEQ ID NO: 14525
  REGION 1..85: note = Description of Unknown:random_neg_ctrl neg_ctrl sequence

SEQ ID NO: 46561 - protein, 85 aa, unidentified; identical to SEQ ID NO: 14526
  REGION 1..85: note = Description of Unknown:random_neg_ctrl neg_ctrl sequence

SEQ ID NO: 46562 - protein, 85 aa, unidentified; identical to SEQ ID NO: 14527
  REGION 1..85: note = Description of Unknown:random_neg_ctrl neg_ctrl sequence

SEQ ID NO: 46563 - protein, 85 aa, unidentified; identical to SEQ ID NO: 14528
  REGION 1..85: note = Description of Unknown:random_neg_ctrl neg_ctrl sequence

SEQ ID NO: 46564 - protein, 85 aa, unidentified; identical to SEQ ID NO: 14529
  REGION 1..85: note = Description of Unknown:random_neg_ctrl neg_ctrl sequence

SEQ ID NO: 46565 - protein, 85 aa, unidentified; identical to SEQ ID NO: 14530
  REGION 1..85: note = Description of Unknown:random_neg_ctrl neg_ctrl sequence

SEQ ID NO: 46566 - protein, 85 aa, unidentified; identical to SEQ ID NO: 14531
  REGION 1..85: note = Description of Unknown:random_neg_ctrl neg_ctrl sequence

SEQ ID NO: 46567 - protein, 85 aa, unidentified; identical to SEQ ID NO: 14532
  REGION 1..85: note = Description of Unknown:random_neg_ctrl neg_ctrl sequence

SEQ ID NO: 46568 - protein, 85 aa, unidentified; identical to SEQ ID NO: 14533
  REGION 1..85: note = Description of Unknown:random_neg_ctrl neg_ctrl sequence

SEQ ID NO: 46569 - protein, 85 aa, unidentified; identical to SEQ ID NO: 14534
  REGION 1..85: note = Description of Unknown:random_neg_ctrl neg_ctrl sequence

SEQ ID NO: 46570 - protein, 85 aa, unidentified; identical to SEQ ID NO: 14535
  REGION 1..85: note = Description of Unknown:random_neg_ctrl neg_ctrl sequence

SEQ ID NO: 46571 - protein, 85 aa, unidentified; identical to SEQ ID NO: 14536
  REGION 1..85: note = Description of Unknown:random_neg_ctrl neg_ctrl sequence

SEQ ID NO: 46572 - protein, 85 aa, unidentified; identical to SEQ ID NO: 14537
  REGION 1..85: note = Description of Unknown:random_neg_ctrl neg_ctrl sequence

SEQ ID NO: 46573 - protein, 17 aa, unidentified
  REGION 1..17: note = Description of Unknown:random_neg_ctrl neg_ctrl sequence
SEIRENRTSPIPPPDPG

SEQ ID NO: 46574 - protein, 85 aa, unidentified; identical to SEQ ID NO: 14539
  REGION 1..85: note = Description of Unknown:random_neg_ctrl neg_ctrl sequence

SEQ ID NO: 46575 - protein, 85 aa, unidentified; identical to SEQ ID NO: 14540
  REGION 1..85: note = Description of Unknown:random_neg_ctrl neg_ctrl sequence

SEQ ID NO: 46576 - protein, 85 aa, unidentified; identical to SEQ ID NO: 14541
  REGION 1..85: note = Description of Unknown:random_neg_ctrl neg_ctrl sequence

SEQ ID NO: 46577 - protein, 85 aa, unidentified; identical to SEQ ID NO: 14542
  REGION 1..85: note = Description of Unknown:random_neg_ctrl neg_ctrl sequence

SEQ ID NO: 46578 - protein, 85 aa, unidentified; identical to SEQ ID NO: 14543
  REGION 1..85: note = Description of Unknown:random_neg_ctrl neg_ctrl sequence

SEQ ID NO: 46579 - protein, 85 aa, unidentified; identical to SEQ ID NO: 14544
  REGION 1..85: note = Description of Unknown:random_neg_ctrl neg_ctrl sequence

SEQ ID NO: 46580 - protein, 85 aa, unidentified; identical to SEQ ID NO: 14545
  REGION 1..85: note = Description of Unknown:random_neg_ctrl neg_ctrl sequence

SEQ ID NO: 46581 - protein, 85 aa, unidentified; identical to SEQ ID NO: 14546
  REGION 1..85: note = Description of Unknown:random_neg_ctrl neg_ctrl sequence

SEQ ID NO: 46582 - protein, 85 aa, unidentified; identical to SEQ ID NO: 14547
  REGION 1..85: note = Description of Unknown:random_neg_ctrl neg_ctrl sequence

SEQ ID NO: 46583 - protein, 85 aa, unidentified; identical to SEQ ID NO: 14548
  REGION 1..85: note = Description of Unknown:random_neg_ctrl neg_ctrl sequence

SEQ ID NO: 46584 - protein, 85 aa, unidentified; identical to SEQ ID NO: 14549
  REGION 1..85: note = Description of Unknown:random_neg_ctrl neg_ctrl sequence

SEQ ID NO: 46585 - protein, 85 aa, unidentified; identical to SEQ ID NO: 14550
  REGION 1..85: note = Description of Unknown:random_neg_ctrl neg_ctrl sequence

SEQ ID NO: 46586 - protein, 85 aa, unidentified; identical to SEQ ID NO: 14551
  REGION 1..85: note = Description of Unknown:random_neg_ctrl neg_ctrl sequence

SEQ ID NO: 46587 - protein, 85 aa, unidentified; identical to SEQ ID NO: 14552
  REGION 1..85: note = Description of Unknown:random_neg_ctrl neg_ctrl sequence

SEQ ID NO: 46588 - protein, 36 aa, unidentified; identical to SEQ ID NO: 14553
  REGION 1..36: note = Description of Unknown:random_neg_ctrl neg_ctrl sequence

SEQ ID NO: 46589 - protein, 85 aa, unidentified; identical to SEQ ID NO: 14554
  REGION 1..85: note = Description of Unknown:random_neg_ctrl neg_ctrl sequence

SEQ ID NO: 46590 - protein, 84 aa, unidentified; identical to SEQ ID NO: 14555
  REGION 1..84: note = Description of Unknown:random_neg_ctrl neg_ctrl sequence

SEQ ID NO: 46591 - protein, 85 aa, unidentified; identical to SEQ ID NO: 14556
  REGION 1..85: note = Description of Unknown:random_neg_ctrl neg_ctrl sequence

SEQ ID NO: 46592 - protein, 85 aa, unidentified; identical to SEQ ID NO: 14557
  REGION 1..85: note = Description of Unknown:random_neg_ctrl neg_ctrl sequence

SEQ ID NO: 46593 - protein, 85 aa, unidentified; identical to SEQ ID NO: 14558
  REGION 1..85: note = Description of Unknown:random_neg_ctrl neg_ctrl sequence

SEQ ID NO: 46594 - protein, 85 aa, unidentified; identical to SEQ ID NO: 14559
  REGION 1..85: note = Description of Unknown:random_neg_ctrl neg_ctrl sequence

SEQ ID NO: 46595 - protein, 85 aa, unidentified; identical to SEQ ID NO: 14560
  REGION 1..85: note = Description of Unknown:random_neg_ctrl neg_ctrl sequence

SEQ ID NO: 46596 - protein, 85 aa, unidentified; identical to SEQ ID NO: 14561
  REGION 1..85: note = Description of Unknown:random_neg_ctrl neg_ctrl sequence

SEQ ID NO: 46597 - protein, 85 aa, unidentified; identical to SEQ ID NO: 14562
  REGION 1..85: note = Description of Unknown:random_neg_ctrl neg_ctrl sequence

SEQ ID NO: 46598 - protein, 85 aa, unidentified; identical to SEQ ID NO: 14563
  REGION 1..85: note = Description of Unknown:random_neg_ctrl neg_ctrl sequence

SEQ ID NO: 46599 - protein, 85 aa, unidentified; identical to SEQ ID NO: 14564
  REGION 1..85: note = Description of Unknown:random_neg_ctrl neg_ctrl sequence

SEQ ID NO: 46600 - protein, 84 aa, unidentified; identical to SEQ ID NO: 14565
  REGION 1..84: note = Description of Unknown:random_neg_ctrl neg_ctrl sequence

SEQ ID NO: 46601 - protein, 85 aa, unidentified; identical to SEQ ID NO: 14566
  REGION 1..85: note = Description of Unknown:random_neg_ctrl neg_ctrl sequence

SEQ ID NO: 46602 - protein, 85 aa, unidentified; identical to SEQ ID NO: 14567
  REGION 1..85: note = Description of Unknown:random_neg_ctrl neg_ctrl sequence

SEQ ID NO: 46603 - protein, 85 aa, unidentified; identical to SEQ ID NO: 14568
  REGION 1..85: note = Description of Unknown:random_neg_ctrl neg_ctrl sequence

SEQ ID NO: 46604 - protein, 85 aa, unidentified; identical to SEQ ID NO: 14569
  REGION 1..85: note = Description of Unknown:random_neg_ctrl neg_ctrl sequence

SEQ ID NO: 46605 - protein, 85 aa, unidentified; identical to SEQ ID NO: 14570
  REGION 1..85: note = Description of Unknown:random_neg_ctrl neg_ctrl sequence

SEQ ID NO: 46606 - protein, 85 aa, unidentified
  REGION 1..85: note = Description of Unknown:random_neg_ctrl neg_ctrl sequence
LGQLAIDKVLHEQKPNSPEVTMLLLREANDQSEVLAIAEEKTEMLKGDGETPPSQHNFKSCESEPEMWSVLHRPEFCELKNPNRQ

SEQ ID NO: 46607 - protein, 85 aa, unidentified; identical to SEQ ID NO: 14572
  REGION 1..85: note = Description of Unknown:random_neg_ctrl neg_ctrl sequence

SEQ ID NO: 46608 - protein, 85 aa, unidentified; identical to SEQ ID NO: 14573
  REGION 1..85: note = Description of Unknown:random_neg_ctrl neg_ctrl sequence

SEQ ID NO: 46609 - protein, 85 aa, unidentified; identical to SEQ ID NO: 14574
  REGION 1..85: note = Description of Unknown:random_neg_ctrl neg_ctrl sequence

SEQ ID NO: 46610 - protein, 85 aa, unidentified; identical to SEQ ID NO: 14575
  REGION 1..85: note = Description of Unknown:random_neg_ctrl neg_ctrl sequence

SEQ ID NO: 46611 - protein, 85 aa, unidentified; identical to SEQ ID NO: 14576
  REGION 1..85: note = Description of Unknown:random_neg_ctrl neg_ctrl sequence

SEQ ID NO: 46612 - protein, 85 aa, unidentified; identical to SEQ ID NO: 14577
  REGION 1..85: note = Description of Unknown:random_neg_ctrl neg_ctrl sequence

SEQ ID NO: 46613 - protein, 85 aa, unidentified; identical to SEQ ID NO: 14578
  REGION 1..85: note = Description of Unknown:random_neg_ctrl neg_ctrl sequence

SEQ ID NO: 46614 - protein, 85 aa, unidentified; identical to SEQ ID NO: 14579
  REGION 1..85: note = Description of Unknown:random_neg_ctrl neg_ctrl sequence

SEQ ID NO: 46615 - protein, 85 aa, unidentified; identical to SEQ ID NO: 14580
  REGION 1..85: note = Description of Unknown:random_neg_ctrl neg_ctrl sequence

SEQ ID NO: 46616 - protein, 85 aa, unidentified; identical to SEQ ID NO: 14581
  REGION 1..85: note = Description of Unknown:random_neg_ctrl neg_ctrl sequence

SEQ ID NO: 46617 - protein, 85 aa, unidentified; identical to SEQ ID NO: 14582
  REGION 1..85: note = Description of Unknown:random_neg_ctrl neg_ctrl sequence

SEQ ID NO: 46618 - protein, 85 aa, unidentified; identical to SEQ ID NO: 14583
  REGION 1..85: note = Description of Unknown:random_neg_ctrl neg_ctrl sequence

SEQ ID NO: 46619 - protein, 85 aa, unidentified; identical to SEQ ID NO: 14584
  REGION 1..85: note = Description of Unknown:random_neg_ctrl neg_ctrl sequence

SEQ ID NO: 46620 - protein, 85 aa, unidentified; identical to SEQ ID NO: 14585
  REGION 1..85: note = Description of Unknown:random_neg_ctrl neg_ctrl sequence

SEQ ID NO: 46621 - protein, 85 aa, unidentified; identical to SEQ ID NO: 14586
  REGION 1..85: note = Description of Unknown:random_neg_ctrl neg_ctrl sequence

SEQ ID NO: 46622 - protein, 85 aa, unidentified; identical to SEQ ID NO: 14587
  REGION 1..85: note = Description of Unknown:random_neg_ctrl neg_ctrl sequence

SEQ ID NO: 46623 - protein, 85 aa, unidentified; identical to SEQ ID NO: 14588
  REGION 1..85: note = Description of Unknown:random_neg_ctrl neg_ctrl sequence

SEQ ID NO: 46624 - protein, 85 aa, unidentified
  REGION 1..85: note = Description of Unknown:random_neg_ctrl neg_ctrl sequence
LAAGSFNADIKITESFADERQLHERDGMCQEEFASTLVRQTTPEKQKEGRSLGAATLERGTFKVPWTRLKDNVDELGAKQLKVFS

SEQ ID NO: 46625 - protein, 85 aa, unidentified; identical to SEQ ID NO: 14590
  REGION 1..85: note = Description of Unknown:random_neg_ctrl neg_ctrl sequence

SEQ ID NO: 46626 - protein, 85 aa, unidentified; identical to SEQ ID NO: 14591
  REGION 1..85: note = Description of Unknown:random_neg_ctrl neg_ctrl sequence

SEQ ID NO: 46627 - protein, 24 aa, unidentified
  REGION 1..24: note = Description of Unknown:random_neg_ctrl neg_ctrl sequence
GLYFGQAETAQNGQCRSLPGGPVS

SEQ ID NO: 46628 - protein, 85 aa, unidentified; identical to SEQ ID NO: 14593
  REGION 1..85: note = Description of Unknown:random_neg_ctrl neg_ctrl sequence

SEQ ID NO: 46629 - protein, 85 aa, unidentified; identical to SEQ ID NO: 14594
  REGION 1..85: note = Description of Unknown:random_neg_ctrl neg_ctrl sequence

SEQ ID NO: 46630 - protein, 85 aa, unidentified; identical to SEQ ID NO: 14595
  REGION 1..85: note = Description of Unknown:random_neg_ctrl neg_ctrl sequence

SEQ ID NO: 46631 - protein, 85 aa, unidentified; identical to SEQ ID NO: 14596
  REGION 1..85: note = Description of Unknown:random_neg_ctrl neg_ctrl sequence

SEQ ID NO: 46632 - protein, 85 aa, unidentified; identical to SEQ ID NO: 14597
  REGION 1..85: note = Description of Unknown:random_neg_ctrl neg_ctrl sequence

SEQ ID NO: 46633 - protein, 85 aa, unidentified; identical to SEQ ID NO: 14598
  REGION 1..85: note = Description of Unknown:random_neg_ctrl neg_ctrl sequence

SEQ ID NO: 46634 - protein, 85 aa, unidentified; identical to SEQ ID NO: 14599
  REGION 1..85: note = Description of Unknown:random_neg_ctrl neg_ctrl sequence

SEQ ID NO: 46635 - protein, 85 aa, unidentified; identical to SEQ ID NO: 14600
  REGION 1..85: note = Description of Unknown:random_neg_ctrl neg_ctrl sequence

SEQ ID NO: 46636 - protein, 85 aa, unidentified; identical to SEQ ID NO: 14601
  REGION 1..85: note = Description of Unknown:random_neg_ctrl neg_ctrl sequence

SEQ ID NO: 46637 - protein, 85 aa, unidentified; identical to SEQ ID NO: 14602
  REGION 1..85: note = Description of Unknown:random_neg_ctrl neg_ctrl sequence

SEQ ID NO: 46638 - protein, 85 aa, unidentified; identical to SEQ ID NO: 14603
  REGION 1..85: note = Description of Unknown:random_neg_ctrl neg_ctrl sequence

SEQ ID NO: 46639 - protein, 84 aa, unidentified; identical to SEQ ID NO: 14604
  REGION 1..84: note = Description of Unknown:random_neg_ctrl neg_ctrl sequence

SEQ ID NO: 46640 - protein, 85 aa, unidentified; identical to SEQ ID NO: 14605
  REGION 1..85: note = Description of Unknown:random_neg_ctrl neg_ctrl sequence

SEQ ID NO: 46641 - protein, 85 aa, unidentified; identical to SEQ ID NO: 15445
  REGION 1..85: note = Description of Unknown:ENSG00000119772 known_pos_ctrl sequence

SEQ ID NO: 46642 - protein, 85 aa, unidentified; identical to SEQ ID NO: 15446
  REGION 1..85: note = Description of Unknown:ENSG00000119772 known_pos_ctrl sequence

SEQ ID NO: 46643 - protein, 85 aa, unidentified; identical to SEQ ID NO: 15447
  REGION 1..85: note = Description of Unknown:ENSG00000119772 known_pos_ctrl sequence

SEQ ID NO: 46644 - protein, 85 aa, unidentified; identical to SEQ ID NO: 15448
  REGION 1..85: note = Description of Unknown:ENSG00000119772 known_pos_ctrl sequence

SEQ ID NO: 46645 - protein, 85 aa, unidentified; identical to SEQ ID NO: 15449
  REGION 1..85: note = Description of Unknown:ENSG00000119772 known_pos_ctrl sequence

SEQ ID NO: 46646 - protein, 85 aa, unidentified; identical to SEQ ID NO: 15450
  REGION 1..85: note = Description of Unknown:ENSG00000119772 known_pos_ctrl sequence

SEQ ID NO: 46647 - protein, 85 aa, unidentified; identical to SEQ ID NO: 15451
  REGION 1..85: note = Description of Unknown:ENSG00000119772 known_pos_ctrl sequence

SEQ ID NO: 46648 - protein, 85 aa, unidentified; identical to SEQ ID NO: 15452
  REGION 1..85: note = Description of Unknown:ENSG00000119772 known_pos_ctrl sequence

SEQ ID NO: 46649 - protein, 85 aa, unidentified; identical to SEQ ID NO: 15453
  REGION 1..85: note = Description of Unknown:ENSG00000119772 known_pos_ctrl sequence

SEQ ID NO: 46650 - protein, 85 aa, unidentified; identical to SEQ ID NO: 15454
  REGION 1..85: note = Description of Unknown:ENSG00000119772 known_pos_ctrl sequence

SEQ ID NO: 46651 - protein, 84 aa, unidentified; identical to SEQ ID NO: 15455
  REGION 1..84: note = Description of Unknown:ENSG00000119772 known_pos_ctrl sequence

SEQ ID NO: 46652 - protein, 85 aa, unidentified; identical to SEQ ID NO: 15456
  REGION 1..85: note = Description of Unknown:ENSG00000119772 known_pos_ctrl sequence

SEQ ID NO: 46653 - protein, 85 aa, unidentified; identical to SEQ ID NO: 15457
  REGION 1..85: note = Description of Unknown:ENSG00000119772 known_pos_ctrl sequence

SEQ ID NO: 46654 - protein, 85 aa, unidentified; identical to SEQ ID NO: 15458
  REGION 1..85: note = Description of Unknown:ENSG00000119772 known_pos_ctrl sequence

SEQ ID NO: 46655 - protein, 85 aa, unidentified; identical to SEQ ID NO: 15459
  REGION 1..85: note = Description of Unknown:ENSG00000119772 known_pos_ctrl sequence

SEQ ID NO: 46656 - protein, 85 aa, unidentified; identical to SEQ ID NO: 15460
  REGION 1..85: note = Description of Unknown:ENSG00000119772 known_pos_ctrl sequence

SEQ ID NO: 46657 - protein, 85 aa, unidentified; identical to SEQ ID NO: 15461
  REGION 1..85: note = Description of Unknown:ENSG00000119772 known_pos_ctrl sequence

SEQ ID NO: 46658 - protein, 85 aa, unidentified; identical to SEQ ID NO: 15462
  REGION 1..85: note = Description of Unknown:ENSG00000119772 known_pos_ctrl sequence

SEQ ID NO: 46659 - protein, 85 aa, unidentified; identical to SEQ ID NO: 15463
  REGION 1..85: note = Description of Unknown:ENSG00000119772 known_pos_ctrl sequence

SEQ ID NO: 46660 - protein, 85 aa, unidentified; identical to SEQ ID NO: 15464
  REGION 1..85: note = Description of Unknown:ENSG00000119772 known_pos_ctrl sequence

SEQ ID NO: 46661 - protein, 85 aa, unidentified; identical to SEQ ID NO: 15465
  REGION 1..85: note = Description of Unknown:ENSG00000119772 known_pos_ctrl sequence

SEQ ID NO: 46662 - protein, 85 aa, unidentified; identical to SEQ ID NO: 15466
  REGION 1..85: note = Description of Unknown:ENSG00000171720 known_pos_ctrl sequence

SEQ ID NO: 46663 - protein, 85 aa, unidentified; identical to SEQ ID NO: 15467
  REGION 1..85: note = Description of Unknown:ENSG00000171720 known_pos_ctrl sequence

SEQ ID NO: 46664 - protein, 85 aa, unidentified; identical to SEQ ID NO: 15468
  REGION 1..85: note = Description of Unknown:ENSG00000171720 known_pos_ctrl sequence

SEQ ID NO: 46665 - protein, 85 aa, unidentified; identical to SEQ ID NO: 15469
  REGION 1..85: note = Description of Unknown:ENSG00000171720 known_pos_ctrl sequence

SEQ ID NO: 46666 - protein, 85 aa, unidentified; identical to SEQ ID NO: 15470
  REGION 1..85: note = Description of Unknown:ENSG00000171720 known_pos_ctrl sequence

SEQ ID NO: 46667 - protein, 84 aa, unidentified; identical to SEQ ID NO: 15471
  REGION 1..84: note = Description of Unknown:ENSG00000171720 known_pos_ctrl sequence

SEQ ID NO: 46668 - protein, 85 aa, unidentified; identical to SEQ ID NO: 15472
  REGION 1..85: note = Description of Unknown:ENSG00000171720 known_pos_ctrl sequence

SEQ ID NO: 46669 - protein, 85 aa, unidentified; identical to SEQ ID NO: 15473
  REGION 1..85: note = Description of Unknown:ENSG00000171720 known_pos_ctrl sequence

SEQ ID NO: 46670 - protein, 85 aa, unidentified; identical to SEQ ID NO: 15474
  REGION 1..85: note = Description of Unknown:ENSG00000171720 known_pos_ctrl sequence

SEQ ID NO: 46671 - protein, 85 aa, unidentified; identical to SEQ ID NO: 15475
  REGION 1..85: note = Description of Unknown:ENSG00000171720 known_pos_ctrl sequence

SEQ ID NO: 46672 - protein, 85 aa, unidentified; identical to SEQ ID NO: 15476
  REGION 1..85: note = Description of Unknown:ENSG00000088305 known_pos_ctrl sequence

SEQ ID NO: 46673 - protein, 85 aa, unidentified; identical to SEQ ID NO: 15477
  REGION 1..85: note = Description of Unknown:ENSG00000088305 known_pos_ctrl sequence

SEQ ID NO: 46674 - protein, 85 aa, unidentified; identical to SEQ ID NO: 15478
  REGION 1..85: note = Description of Unknown:ENSG00000088305 known_pos_ctrl sequence

SEQ ID NO: 46675 - protein, 85 aa, unidentified; identical to SEQ ID NO: 15479
  REGION 1..85: note = Description of Unknown:ENSG00000088305 known_pos_ctrl sequence

SEQ ID NO: 46676 - protein, 85 aa, unidentified; identical to SEQ ID NO: 15480
  REGION 1..85: note = Description of Unknown:ENSG00000088305 known_pos_ctrl sequence

SEQ ID NO: 46677 - protein, 85 aa, unidentified; identical to SEQ ID NO: 15481
  REGION 1..85: note = Description of Unknown:ENSG00000088305 known_pos_ctrl sequence

SEQ ID NO: 46678 - protein, 85 aa, unidentified; identical to SEQ ID NO: 15482
  REGION 1..85: note = Description of Unknown:ENSG00000088305 known_pos_ctrl sequence

SEQ ID NO: 46679 - protein, 85 aa, unidentified; identical to SEQ ID NO: 15483
  REGION 1..85: note = Description of Unknown:ENSG00000088305 known_pos_ctrl sequence

SEQ ID NO: 46680 - protein, 85 aa, unidentified; identical to SEQ ID NO: 15484
  REGION 1..85: note = Description of Unknown:ENSG00000088305 known_pos_ctrl sequence

SEQ ID NO: 46681 - protein, 84 aa, unidentified; identical to SEQ ID NO: 15485
  REGION 1..84: note = Description of Unknown:ENSG00000088305 known_pos_ctrl sequence

SEQ ID NO: 46682 - protein, 85 aa, unidentified; identical to SEQ ID NO: 15486
  REGION 1..85: note = Description of Unknown:ENSG00000088305 known_pos_ctrl sequence

SEQ ID NO: 46683 - protein, 85 aa, unidentified; identical to SEQ ID NO: 15487
  REGION 1..85: note = Description of Unknown:ENSG00000088305 known_pos_ctrl sequence

SEQ ID NO: 46684 - protein, 85 aa, unidentified; identical to SEQ ID NO: 15488
  REGION 1..85: note = Description of Unknown:ENSG00000088305 known_pos_ctrl sequence

SEQ ID NO: 46685 - protein, 85 aa, unidentified; identical to SEQ ID NO: 15489
  REGION 1..85: note = Description of Unknown:ENSG00000088305 known_pos_ctrl sequence

SEQ ID NO: 46686 - protein, 85 aa, unidentified; identical to SEQ ID NO: 15490
  REGION 1..85: note = Description of Unknown:ENSG00000088305 known_pos_ctrl sequence

SEQ ID NO: 46687 - protein, 85 aa, unidentified; identical to SEQ ID NO: 15491
  REGION 1..85: note = Description of Unknown:ENSG00000088305 known_pos_ctrl sequence

SEQ ID NO: 46688 - protein, 85 aa, unidentified; identical to SEQ ID NO: 15492
  REGION 1..85: note = Description of Unknown:ENSG00000088305 known_pos_ctrl sequence

SEQ ID NO: 46689 - protein, 85 aa, unidentified; identical to SEQ ID NO: 15493
  REGION 1..85: note = Description of Unknown:ENSG00000088305 known_pos_ctrl sequence

SEQ ID NO: 46690 - protein, 85 aa, unidentified; identical to SEQ ID NO: 15494
  REGION 1..85: note = Description of Unknown:ENSG00000088305 known_pos_ctrl sequence

SEQ ID NO: 46691 - protein, 85 aa, unidentified; identical to SEQ ID NO: 15495
  REGION 1..85: note = Description of Unknown:ENSG00000106462 known_pos_ctrl sequence

SEQ ID NO: 46692 - protein, 85 aa, unidentified; identical to SEQ ID NO: 15496
  REGION 1..85: note = Description of Unknown:ENSG00000106462 known_pos_ctrl sequence

SEQ ID NO: 46693 - protein, 85 aa, unidentified; identical to SEQ ID NO: 15497
  REGION 1..85: note = Description of Unknown:ENSG00000106462 known_pos_ctrl sequence

SEQ ID NO: 46694 - protein, 85 aa, unidentified; identical to SEQ ID NO: 15498
  REGION 1..85: note = Description of Unknown:ENSG00000106462 known_pos_ctrl sequence

SEQ ID NO: 46695 - protein, 85 aa, unidentified; identical to SEQ ID NO: 15499
  REGION 1..85: note = Description of Unknown:ENSG00000106462 known_pos_ctrl sequence

SEQ ID NO: 46696 - protein, 85 aa, unidentified; identical to SEQ ID NO: 15500
  REGION 1..85: note = Description of Unknown:ENSG00000106462 known_pos_ctrl sequence

SEQ ID NO: 46697 - protein, 85 aa, unidentified; identical to SEQ ID NO: 15501
  REGION 1..85: note = Description of Unknown:ENSG00000106462 known_pos_ctrl sequence

SEQ ID NO: 46698 - protein, 85 aa, unidentified; identical to SEQ ID NO: 15502
  REGION 1..85: note = Description of Unknown:ENSG00000106462 known_pos_ctrl sequence

SEQ ID NO: 46699 - protein, 84 aa, unidentified; identical to SEQ ID NO: 15503
  REGION 1..84: note = Description of Unknown:ENSG00000106462 known_pos_ctrl sequence

SEQ ID NO: 46700 - protein, 85 aa, unidentified; identical to SEQ ID NO: 15504
  REGION 1..85: note = Description of Unknown:ENSG00000106462 known_pos_ctrl sequence

SEQ ID NO: 46701 - protein, 85 aa, unidentified; identical to SEQ ID NO: 15505
  REGION 1..85: note = Description of Unknown:ENSG00000106462 known_pos_ctrl sequence

SEQ ID NO: 46702 - protein, 85 aa, unidentified; identical to SEQ ID NO: 15506
  REGION 1..85: note = Description of Unknown:ENSG00000106462 known_pos_ctrl sequence

SEQ ID NO: 46703 - protein, 85 aa, unidentified; identical to SEQ ID NO: 15507
  REGION 1..85: note = Description of Unknown:ENSG00000106462 known_pos_ctrl sequence

SEQ ID NO: 46704 - protein, 85 aa, unidentified; identical to SEQ ID NO: 15508
  REGION 1..85: note = Description of Unknown:ENSG00000106462 known_pos_ctrl sequence

SEQ ID NO: 46705 - protein, 85 aa, unidentified; identical to SEQ ID NO: 15509
  REGION 1..85: note = Description of Unknown:ENSG00000106462 known_pos_ctrl sequence

SEQ ID NO: 46706 - protein, 85 aa, unidentified; identical to SEQ ID NO: 15510
  REGION 1..85: note = Description of Unknown:ENSG00000106462 known_pos_ctrl sequence

SEQ ID NO: 46707 - protein, 85 aa, unidentified; identical to SEQ ID NO: 15511
  REGION 1..85: note = Description of Unknown:ENSG00000106462 known_pos_ctrl sequence

SEQ ID NO: 46708 - protein, 85 aa, unidentified; identical to SEQ ID NO: 15512
  REGION 1..85: note = Description of Unknown:ENSG00000187605 known_pos_ctrl sequence

SEQ ID NO: 46709 - protein, 85 aa, unidentified; identical to SEQ ID NO: 15513
  REGION 1..85: note = Description of Unknown:ENSG00000187605 known_pos_ctrl sequence

SEQ ID NO: 46710 - protein, 85 aa, unidentified; identical to SEQ ID NO: 15514
  REGION 1..85: note = Description of Unknown:ENSG00000187605 known_pos_ctrl sequence

SEQ ID NO: 46711 - protein, 85 aa, unidentified; identical to SEQ ID NO: 15515
  REGION 1..85: note = Description of Unknown:ENSG00000187605 known_pos_ctrl sequence

SEQ ID NO: 46712 - protein, 85 aa, unidentified; identical to SEQ ID NO: 15516
  REGION 1..85: note = Description of Unknown:ENSG00000187605 known_pos_ctrl sequence

SEQ ID NO: 46713 - protein, 85 aa, unidentified; identical to SEQ ID NO: 15517
  REGION 1..85: note = Description of Unknown:ENSG00000187605 known_pos_ctrl sequence

SEQ ID NO: 46714 - protein, 85 aa, unidentified; identical to SEQ ID NO: 15518
  REGION 1..85: note = Description of Unknown:ENSG00000187605 known_pos_ctrl sequence

SEQ ID NO: 46715 - protein, 85 aa, unidentified; identical to SEQ ID NO: 15519
  REGION 1..85: note = Description of Unknown:ENSG00000187605 known_pos_ctrl sequence

SEQ ID NO: 46716 - protein, 85 aa, unidentified; identical to SEQ ID NO: 15520
  REGION 1..85: note = Description of Unknown:ENSG00000187605 known_pos_ctrl sequence

SEQ ID NO: 46717 - protein, 85 aa, unidentified; identical to SEQ ID NO: 15521
  REGION 1..85: note = Description of Unknown:ENSG00000187605 known_pos_ctrl sequence

SEQ ID NO: 46718 - protein, 85 aa, unidentified; identical to SEQ ID NO: 15522
  REGION 1..85: note = Description of Unknown:ENSG00000187605 known_pos_ctrl sequence

SEQ ID NO: 46719 - protein, 85 aa, unidentified; identical to SEQ ID NO: 15523
  REGION 1..85: note = Description of Unknown:ENSG00000187605 known_pos_ctrl sequence

SEQ ID NO: 46720 - protein, 85 aa, unidentified
  REGION 1..85: note = Description of Unknown:ENSG00000187605 known_pos_ctrl sequence
LYKMANTDEFGSEENQNAKVGSGAIQVLTAFPREVRRLPEPAKSCRQRQLEARKAAAEKKKIQKEKLSTPEKIKQEALELAGITS

SEQ ID NO: 46721 - protein, 85 aa, unidentified; identical to SEQ ID NO: 15525
  REGION 1..85: note = Description of Unknown:ENSG00000187605 known_pos_ctrl sequence

SEQ ID NO: 46722 - protein, 85 aa, unidentified; identical to SEQ ID NO: 15526
  REGION 1..85: note = Description of Unknown:ENSG00000187605 known_pos_ctrl sequence

SEQ ID NO: 46723 - protein, 85 aa, unidentified; identical to SEQ ID NO: 15527
  REGION 1..85: note = Description of Unknown:ENSG00000187605 known_pos_ctrl sequence

SEQ ID NO: 46724 - protein, 85 aa, unidentified; identical to SEQ ID NO: 15528
  REGION 1..85: note = Description of Unknown:ENSG00000187605 known_pos_ctrl sequence

SEQ ID NO: 46725 - protein, 85 aa, unidentified; identical to SEQ ID NO: 15529
  REGION 1..85: note = Description of Unknown:ENSG00000187605 known_pos_ctrl sequence

SEQ ID NO: 46726 - protein, 85 aa, unidentified; identical to SEQ ID NO: 15530
  REGION 1..85: note = Description of Unknown:ENSG00000187605 known_pos_ctrl sequence

SEQ ID NO: 46727 - protein, 85 aa, unidentified; identical to SEQ ID NO: 15531
  REGION 1..85: note = Description of Unknown:ENSG00000187605 known_pos_ctrl sequence

SEQ ID NO: 46728 - protein, 84 aa, unidentified; identical to SEQ ID NO: 15532
  REGION 1..84: note = Description of Unknown:ENSG00000187605 known_pos_ctrl sequence

SEQ ID NO: 46729 - protein, 85 aa, unidentified; identical to SEQ ID NO: 15533
  REGION 1..85: note = Description of Unknown:ENSG00000187605 known_pos_ctrl sequence

SEQ ID NO: 46730 - protein, 85 aa, unidentified; identical to SEQ ID NO: 15534
  REGION 1..85: note = Description of Unknown:ENSG00000187605 known_pos_ctrl sequence

SEQ ID NO: 46731 - protein, 85 aa, unidentified; identical to SEQ ID NO: 15535
  REGION 1..85: note = Description of Unknown:ENSG00000187605 known_pos_ctrl sequence

SEQ ID NO: 46732 - protein, 85 aa, unidentified; identical to SEQ ID NO: 15536
  REGION 1..85: note = Description of Unknown:ENSG00000187605 known_pos_ctrl sequence

SEQ ID NO: 46733 - protein, 85 aa, unidentified; identical to SEQ ID NO: 15537
  REGION 1..85: note = Description of Unknown:ENSG00000187605 known_pos_ctrl sequence

SEQ ID NO: 46734 - protein, 85 aa, unidentified; identical to SEQ ID NO: 15538
  REGION 1..85: note = Description of Unknown:ENSG00000187605 known_pos_ctrl sequence

SEQ ID NO: 46735 - protein, 85 aa, unidentified; identical to SEQ ID NO: 15539
  REGION 1..85: note = Description of Unknown:ENSG00000187605 known_pos_ctrl sequence

SEQ ID NO: 46736 - protein, 85 aa, unidentified; identical to SEQ ID NO: 15540
  REGION 1..85: note = Description of Unknown:ENSG00000187605 known_pos_ctrl sequence

SEQ ID NO: 46737 - protein, 85 aa, unidentified; identical to SEQ ID NO: 15541
  REGION 1..85: note = Description of Unknown:ENSG00000187605 known_pos_ctrl sequence

SEQ ID NO: 46738 - protein, 85 aa, unidentified; identical to SEQ ID NO: 15542
  REGION 1..85: note = Description of Unknown:ENSG00000187605 known_pos_ctrl sequence

SEQ ID NO: 46739 - protein, 85 aa, unidentified; identical to SEQ ID NO: 15543
  REGION 1..85: note = Description of Unknown:ENSG00000187605 known_pos_ctrl sequence

SEQ ID NO: 46740 - protein, 85 aa, unidentified; identical to SEQ ID NO: 15544
  REGION 1..85: note = Description of Unknown:ENSG00000187605 known_pos_ctrl sequence

SEQ ID NO: 46741 - protein, 85 aa, unidentified; identical to SEQ ID NO: 15545
  REGION 1..85: note = Description of Unknown:ENSG00000187605 known_pos_ctrl sequence

SEQ ID NO: 46742 - protein, 85 aa, unidentified; identical to SEQ ID NO: 15546
  REGION 1..85: note = Description of Unknown:ENSG00000187605 known_pos_ctrl sequence

SEQ ID NO: 46743 - protein, 85 aa, unidentified; identical to SEQ ID NO: 15547
  REGION 1..85: note = Description of Unknown:ENSG00000187605 known_pos_ctrl sequence

SEQ ID NO: 46744 - protein, 85 aa, unidentified; identical to SEQ ID NO: 15548
  REGION 1..85: note = Description of Unknown:ENSG00000187605 known_pos_ctrl sequence

SEQ ID NO: 46745 - protein, 85 aa, unidentified; identical to SEQ ID NO: 15549
  REGION 1..85: note = Description of Unknown:ENSG00000187605 known_pos_ctrl sequence

SEQ ID NO: 46746 - protein, 85 aa, unidentified; identical to SEQ ID NO: 15550
  REGION 1..85: note = Description of Unknown:ENSG00000187605 known_pos_ctrl sequence

SEQ ID NO: 46747 - protein, 85 aa, unidentified; identical to SEQ ID NO: 15551
  REGION 1..85: note = Description of Unknown:ENSG00000187605 known_pos_ctrl sequence

SEQ ID NO: 46748 - protein, 85 aa, unidentified; identical to SEQ ID NO: 15552
  REGION 1..85: note = Description of Unknown:ENSG00000168769 known_pos_ctrl sequence

SEQ ID NO: 46749 - protein, 85 aa, unidentified; identical to SEQ ID NO: 15553
  REGION 1..85: note = Description of Unknown:ENSG00000168769 known_pos_ctrl sequence

SEQ ID NO: 46750 - protein, 85 aa, unidentified; identical to SEQ ID NO: 15554
  REGION 1..85: note = Description of Unknown:ENSG00000168769 known_pos_ctrl sequence

SEQ ID NO: 46751 - protein, 85 aa, unidentified; identical to SEQ ID NO: 15555
  REGION 1..85: note = Description of Unknown:ENSG00000168769 known_pos_ctrl sequence

SEQ ID NO: 46752 - protein, 85 aa, unidentified; identical to SEQ ID NO: 15556
  REGION 1..85: note = Description of Unknown:ENSG00000168769 known_pos_ctrl sequence

SEQ ID NO: 46753 - protein, 85 aa, unidentified; identical to SEQ ID NO: 15557
  REGION 1..85: note = Description of Unknown:ENSG00000168769 known_pos_ctrl sequence

SEQ ID NO: 46754 - protein, 85 aa, unidentified; identical to SEQ ID NO: 15558
  REGION 1..85: note = Description of Unknown:ENSG00000168769 known_pos_ctrl sequence

SEQ ID NO: 46755 - protein, 85 aa, unidentified; identical to SEQ ID NO: 15559
  REGION 1..85: note = Description of Unknown:ENSG00000168769 known_pos_ctrl sequence

SEQ ID NO: 46756 - protein, 85 aa, unidentified; identical to SEQ ID NO: 15560
  REGION 1..85: note = Description of Unknown:ENSG00000168769 known_pos_ctrl sequence

SEQ ID NO: 46757 - protein, 85 aa, unidentified; identical to SEQ ID NO: 15561
  REGION 1..85: note = Description of Unknown:ENSG00000168769 known_pos_ctrl sequence

SEQ ID NO: 46758 - protein, 85 aa, unidentified; identical to SEQ ID NO: 15562
  REGION 1..85: note = Description of Unknown:ENSG00000168769 known_pos_ctrl sequence

SEQ ID NO: 46759 - protein, 85 aa, unidentified; identical to SEQ ID NO: 15563
  REGION 1..85: note = Description of Unknown:ENSG00000168769 known_pos_ctrl sequence

SEQ ID NO: 46760 - protein, 85 aa, unidentified; identical to SEQ ID NO: 15564
  REGION 1..85: note = Description of Unknown:ENSG00000168769 known_pos_ctrl sequence

SEQ ID NO: 46761 - protein, 84 aa, unidentified; identical to SEQ ID NO: 15565
  REGION 1..84: note = Description of Unknown:ENSG00000168769 known_pos_ctrl sequence

SEQ ID NO: 46762 - protein, 85 aa, unidentified; identical to SEQ ID NO: 15566
  REGION 1..85: note = Description of Unknown:ENSG00000168769 known_pos_ctrl sequence

SEQ ID NO: 46763 - protein, 85 aa, unidentified; identical to SEQ ID NO: 15567
  REGION 1..85: note = Description of Unknown:ENSG00000168769 known_pos_ctrl sequence

SEQ ID NO: 46764 - protein, 85 aa, unidentified; identical to SEQ ID NO: 15568
  REGION 1..85: note = Description of Unknown:ENSG00000168769 known_pos_ctrl sequence

SEQ ID NO: 46765 - protein, 85 aa, unidentified; identical to SEQ ID NO: 15569
  REGION 1..85: note = Description of Unknown:ENSG00000168769 known_pos_ctrl sequence

SEQ ID NO: 46766 - protein, 85 aa, unidentified; identical to SEQ ID NO: 15570
  REGION 1..85: note = Description of Unknown:ENSG00000168769 known_pos_ctrl sequence

SEQ ID NO: 46767 - protein, 85 aa, unidentified; identical to SEQ ID NO: 15571
  REGION 1..85: note = Description of Unknown:ENSG00000168769 known_pos_ctrl sequence

SEQ ID NO: 46768 - protein, 85 aa, unidentified; identical to SEQ ID NO: 15572
  REGION 1..85: note = Description of Unknown:ENSG00000168769 known_pos_ctrl sequence

SEQ ID NO: 46769 - protein, 85 aa, unidentified; identical to SEQ ID NO: 15573
  REGION 1..85: note = Description of Unknown:ENSG00000168769 known_pos_ctrl sequence

SEQ ID NO: 46770 - protein, 85 aa, unidentified; identical to SEQ ID NO: 15574
  REGION 1..85: note = Description of Unknown:ENSG00000168769 known_pos_ctrl sequence

SEQ ID NO: 46771 - protein, 85 aa, unidentified; identical to SEQ ID NO: 15575
  REGION 1..85: note = Description of Unknown:ENSG00000168769 known_pos_ctrl sequence

SEQ ID NO: 46772 - protein, 85 aa, unidentified; identical to SEQ ID NO: 15576
  REGION 1..85: note = Description of Unknown:ENSG00000168769 known_pos_ctrl sequence

SEQ ID NO: 46773 - protein, 85 aa, unidentified; identical to SEQ ID NO: 15577
  REGION 1..85: note = Description of Unknown:ENSG00000168769 known_pos_ctrl sequence

SEQ ID NO: 46774 - protein, 85 aa, unidentified; identical to SEQ ID NO: 15578
  REGION 1..85: note = Description of Unknown:ENSG00000168769 known_pos_ctrl sequence

SEQ ID NO: 46775 - protein, 85 aa, unidentified; identical to SEQ ID NO: 15579
  REGION 1..85: note = Description of Unknown:ENSG00000169057 known_pos_ctrl sequence

SEQ ID NO: 46776 - protein, 85 aa, unidentified; identical to SEQ ID NO: 15580
  REGION 1..85: note = Description of Unknown:ENSG00000169057 known_pos_ctrl sequence

SEQ ID NO: 46777 - protein, 85 aa, unidentified; identical to SEQ ID NO: 15581
  REGION 1..85: note = Description of Unknown:ENSG00000169057 known_pos_ctrl sequence

SEQ ID NO: 46778 - protein, 85 aa, unidentified; identical to SEQ ID NO: 15582
  REGION 1..85: note = Description of Unknown:ENSG00000169057 known_pos_ctrl sequence

SEQ ID NO: 46779 - protein, 85 aa, unidentified; identical to SEQ ID NO: 15583
  REGION 1..85: note = Description of Unknown:ENSG00000169057 known_pos_ctrl sequence

SEQ ID NO: 46780 - protein, 84 aa, unidentified; identical to SEQ ID NO: 15584
  REGION 1..84: note = Description of Unknown:ENSG00000169057 known_pos_ctrl sequence

SEQ ID NO: 46781 - protein, 85 aa, unidentified; identical to SEQ ID NO: 15585
  REGION 1..85: note = Description of Unknown:ENSG00000169057 known_pos_ctrl sequence

SEQ ID NO: 46782 - protein, 85 aa, unidentified; identical to SEQ ID NO: 15586
  REGION 1..85: note = Description of Unknown:ENSG00000169057 known_pos_ctrl sequence

SEQ ID NO: 46783 - protein, 85 aa, unidentified; identical to SEQ ID NO: 15587
  REGION 1..85: note = Description of Unknown:ENSG00000169057 known_pos_ctrl sequence

SEQ ID NO: 46784 - protein, 85 aa, unidentified; identical to SEQ ID NO: 15588
  REGION 1..85: note = Description of Unknown:ENSG00000169057 known_pos_ctrl sequence

SEQ ID NO: 46785 - protein, 85 aa, unidentified; identical to SEQ ID NO: 15589
  REGION 1..85: note = Description of Unknown:ENSG00000169057 known_pos_ctrl sequence

SEQ ID NO: 46786 - protein, 85 aa, unidentified; identical to SEQ ID NO: 15590
  REGION 1..85: note = Description of Unknown:ENSG00000100393 known_pos_ctrl sequence

SEQ ID NO: 46787 - protein, 85 aa, unidentified; identical to SEQ ID NO: 15591
  REGION 1..85: note = Description of Unknown:ENSG00000100393 known_pos_ctrl sequence

SEQ ID NO: 46788 - protein, 85 aa, unidentified; identical to SEQ ID NO: 15592
  REGION 1..85: note = Description of Unknown:ENSG00000100393 known_pos_ctrl sequence

SEQ ID NO: 46789 - protein, 85 aa, unidentified; identical to SEQ ID NO: 15593
  REGION 1..85: note = Description of Unknown:ENSG00000100393 known_pos_ctrl sequence

SEQ ID NO: 46790 - protein, 85 aa, unidentified; identical to SEQ ID NO: 15594
  REGION 1..85: note = Description of Unknown:ENSG00000100393 known_pos_ctrl sequence

SEQ ID NO: 46791 - protein, 85 aa, unidentified; identical to SEQ ID NO: 15595
  REGION 1..85: note = Description of Unknown:ENSG00000100393 known_pos_ctrl sequence

SEQ ID NO: 46792 - protein, 85 aa, unidentified; identical to SEQ ID NO: 15596
  REGION 1..85: note = Description of Unknown:ENSG00000100393 known_pos_ctrl sequence

SEQ ID NO: 46793 - protein, 85 aa, unidentified; identical to SEQ ID NO: 15597
  REGION 1..85: note = Description of Unknown:ENSG00000100393 known_pos_ctrl sequence

SEQ ID NO: 46794 - protein, 85 aa, unidentified; identical to SEQ ID NO: 15598
  REGION 1..85: note = Description of Unknown:ENSG00000100393 known_pos_ctrl sequence

SEQ ID NO: 46795 - protein, 85 aa, unidentified; identical to SEQ ID NO: 15599
  REGION 1..85: note = Description of Unknown:ENSG00000100393 known_pos_ctrl sequence

SEQ ID NO: 46796 - protein, 85 aa, unidentified; identical to SEQ ID NO: 15600
  REGION 1..85: note = Description of Unknown:ENSG00000100393 known_pos_ctrl sequence

SEQ ID NO: 46797 - protein, 85 aa, unidentified; identical to SEQ ID NO: 15601
  REGION 1..85: note = Description of Unknown:ENSG00000100393 known_pos_ctrl sequence

SEQ ID NO: 46798 - protein, 85 aa, unidentified; identical to SEQ ID NO: 15602
  REGION 1..85: note = Description of Unknown:ENSG00000100393 known_pos_ctrl sequence

SEQ ID NO: 46799 - protein, 85 aa, unidentified; identical to SEQ ID NO: 15603
  REGION 1..85: note = Description of Unknown:ENSG00000100393 known_pos_ctrl sequence

SEQ ID NO: 46800 - protein, 85 aa, unidentified; identical to SEQ ID NO: 15604
  REGION 1..85: note = Description of Unknown:ENSG00000100393 known_pos_ctrl sequence

SEQ ID NO: 46801 - protein, 85 aa, unidentified; identical to SEQ ID NO: 15605
  REGION 1..85: note = Description of Unknown:ENSG00000100393 known_pos_ctrl sequence

SEQ ID NO: 46802 - protein, 85 aa, unidentified; identical to SEQ ID NO: 15606
  REGION 1..85: note = Description of Unknown:ENSG00000100393 known_pos_ctrl sequence

SEQ ID NO: 46803 - protein, 85 aa, unidentified; identical to SEQ ID NO: 15607
  REGION 1..85: note = Description of Unknown:ENSG00000100393 known_pos_ctrl sequence

SEQ ID NO: 46804 - protein, 85 aa, unidentified; identical to SEQ ID NO: 15608
  REGION 1..85: note = Description of Unknown:ENSG00000100393 known_pos_ctrl sequence

SEQ ID NO: 46805 - protein, 85 aa, unidentified; identical to SEQ ID NO: 15609
  REGION 1..85: note = Description of Unknown:ENSG00000100393 known_pos_ctrl sequence

SEQ ID NO: 46806 - protein, 85 aa, unidentified; identical to SEQ ID NO: 15610
  REGION 1..85: note = Description of Unknown:ENSG00000100393 known_pos_ctrl sequence

SEQ ID NO: 46807 - protein, 85 aa, unidentified; identical to SEQ ID NO: 15611
  REGION 1..85: note = Description of Unknown:ENSG00000100393 known_pos_ctrl sequence

SEQ ID NO: 46808 - protein, 85 aa, unidentified; identical to SEQ ID NO: 15612
  REGION 1..85: note = Description of Unknown:ENSG00000100393 known_pos_ctrl sequence

SEQ ID NO: 46809 - protein, 85 aa, unidentified; identical to SEQ ID NO: 15613
  REGION 1..85: note = Description of Unknown:ENSG00000100393 known_pos_ctrl sequence

SEQ ID NO: 46810 - protein, 85 aa, unidentified; identical to SEQ ID NO: 15614
  REGION 1..85: note = Description of Unknown:ENSG00000100393 known_pos_ctrl sequence

SEQ ID NO: 46811 - protein, 85 aa, unidentified; identical to SEQ ID NO: 15615
  REGION 1..85: note = Description of Unknown:ENSG00000100393 known_pos_ctrl sequence

SEQ ID NO: 46812 - protein, 85 aa, unidentified; identical to SEQ ID NO: 15616
  REGION 1..85: note = Description of Unknown:ENSG00000100393 known_pos_ctrl sequence

SEQ ID NO: 46813 - protein, 85 aa, unidentified; identical to SEQ ID NO: 15617
  REGION 1..85: note = Description of Unknown:ENSG00000100393 known_pos_ctrl sequence

SEQ ID NO: 46814 - protein, 84 aa, unidentified; identical to SEQ ID NO: 15618
  REGION 1..84: note = Description of Unknown:ENSG00000100393 known_pos_ctrl sequence

SEQ ID NO: 46815 - protein, 85 aa, unidentified; identical to SEQ ID NO: 15619
  REGION 1..85: note = Description of Unknown:ENSG00000100393 known_pos_ctrl sequence

SEQ ID NO: 46816 - protein, 85 aa, unidentified; identical to SEQ ID NO: 15620
  REGION 1..85: note = Description of Unknown:ENSG00000100393 known_pos_ctrl sequence

SEQ ID NO: 46817 - protein, 85 aa, unidentified; identical to SEQ ID NO: 15621
  REGION 1..85: note = Description of Unknown:ENSG00000100393 known_pos_ctrl sequence

SEQ ID NO: 46818 - protein, 85 aa, unidentified; identical to SEQ ID NO: 15622
  REGION 1..85: note = Description of Unknown:ENSG00000100393 known_pos_ctrl sequence

SEQ ID NO: 46819 - protein, 85 aa, unidentified; identical to SEQ ID NO: 15623
  REGION 1..85: note = Description of Unknown:ENSG00000100393 known_pos_ctrl sequence

SEQ ID NO: 46820 - protein, 85 aa, unidentified; identical to SEQ ID NO: 15624
  REGION 1..85: note = Description of Unknown:ENSG00000100393 known_pos_ctrl sequence

SEQ ID NO: 46821 - protein, 85 aa, unidentified; identical to SEQ ID NO: 15625
  REGION 1..85: note = Description of Unknown:ENSG00000100393 known_pos_ctrl sequence

SEQ ID NO: 46822 - protein, 85 aa, unidentified; identical to SEQ ID NO: 15626
  REGION 1..85: note = Description of Unknown:ENSG00000100393 known_pos_ctrl sequence

SEQ ID NO: 46823 - protein, 85 aa, unidentified; identical to SEQ ID NO: 15627
  REGION 1..85: note = Description of Unknown:ENSG00000100393 known_pos_ctrl sequence

SEQ ID NO: 46824 - protein, 85 aa, unidentified; identical to SEQ ID NO: 15628
  REGION 1..85: note = Description of Unknown:ENSG00000100393 known_pos_ctrl sequence

SEQ ID NO: 46825 - protein, 85 aa, unidentified; identical to SEQ ID NO: 15629
  REGION 1..85: note = Description of Unknown:ENSG00000100393 known_pos_ctrl sequence

SEQ ID NO: 46826 - protein, 85 aa, unidentified; identical to SEQ ID NO: 15630
  REGION 1..85: note = Description of Unknown:ENSG00000100393 known_pos_ctrl sequence

SEQ ID NO: 46827 - protein, 85 aa, unidentified; identical to SEQ ID NO: 15631
  REGION 1..85: note = Description of Unknown:ENSG00000100393 known_pos_ctrl sequence

SEQ ID NO: 46828 - protein, 85 aa, unidentified; identical to SEQ ID NO: 15632
  REGION 1..85: note = Description of Unknown:ENSG00000100393 known_pos_ctrl sequence

SEQ ID NO: 46829 - protein, 85 aa, unidentified; identical to SEQ ID NO: 15633
  REGION 1..85: note = Description of Unknown:ENSG00000100393 known_pos_ctrl sequence

SEQ ID NO: 46830 - protein, 85 aa, unidentified; identical to SEQ ID NO: 15634
  REGION 1..85: note = Description of Unknown:ENSG00000100393 known_pos_ctrl sequence

SEQ ID NO: 46831 - protein, 85 aa, unidentified; identical to SEQ ID NO: 15635
  REGION 1..85: note = Description of Unknown:ENSG00000100393 known_pos_ctrl sequence

SEQ ID NO: 46832 - protein, 85 aa, unidentified; identical to SEQ ID NO: 15636
  REGION 1..85: note = Description of Unknown:ENSG00000100393 known_pos_ctrl sequence

SEQ ID NO: 46833 - protein, 85 aa, unidentified; identical to SEQ ID NO: 15637
  REGION 1..85: note = Description of Unknown:ENSG00000100393 known_pos_ctrl sequence

SEQ ID NO: 46834 - protein, 85 aa, unidentified; identical to SEQ ID NO: 15638
  REGION 1..85: note = Description of Unknown:ENSG00000100393 known_pos_ctrl sequence

SEQ ID NO: 46835 - protein, 85 aa, unidentified; identical to SEQ ID NO: 15639
  REGION 1..85: note = Description of Unknown:ENSG00000100393 known_pos_ctrl sequence

SEQ ID NO: 46836 - protein, 85 aa, unidentified; identical to SEQ ID NO: 15640
  REGION 1..85: note = Description of Unknown:ENSG00000100393 known_pos_ctrl sequence

SEQ ID NO: 46837 - protein, 85 aa, unidentified; identical to SEQ ID NO: 15641
  REGION 1..85: note = Description of Unknown:ENSG00000100393 known_pos_ctrl sequence

SEQ ID NO: 46838 - protein, 85 aa, unidentified; identical to SEQ ID NO: 15642
  REGION 1..85: note = Description of Unknown:ENSG00000100393 known_pos_ctrl sequence

SEQ ID NO: 46839 - protein, 85 aa, unidentified; identical to SEQ ID NO: 15643
  REGION 1..85: note = Description of Unknown:ENSG00000100393 known_pos_ctrl sequence

SEQ ID NO: 46840 - protein, 85 aa, unidentified; identical to SEQ ID NO: 15644
  REGION 1..85: note = Description of Unknown:ENSG00000100393 known_pos_ctrl sequence

SEQ ID NO: 46841 - protein, 85 aa, unidentified; identical to SEQ ID NO: 15645
  REGION 1..85: note = Description of Unknown:ENSG00000100393 known_pos_ctrl sequence

SEQ ID NO: 46842 - protein, 85 aa, unidentified; identical to SEQ ID NO: 15646
  REGION 1..85: note = Description of Unknown:ENSG00000141946 known_pos_ctrl sequence

SEQ ID NO: 46843 - protein, 85 aa, unidentified; identical to SEQ ID NO: 15647
  REGION 1..85: note = Description of Unknown:ENSG00000141946 known_pos_ctrl sequence

SEQ ID NO: 46844 - protein, 85 aa, unidentified; identical to SEQ ID NO: 15648
  REGION 1..85: note = Description of Unknown:ENSG00000141946 known_pos_ctrl sequence

SEQ ID NO: 46845 - protein, 85 aa, unidentified; identical to SEQ ID NO: 15649
  REGION 1..85: note = Description of Unknown:ENSG00000141946 known_pos_ctrl sequence

SEQ ID NO: 46846 - protein, 85 aa, unidentified; identical to SEQ ID NO: 15650
  REGION 1..85: note = Description of Unknown:ENSG00000141946 known_pos_ctrl sequence

SEQ ID NO: 46847 - protein, 84 aa, unidentified; identical to SEQ ID NO: 15651
  REGION 1..84: note = Description of Unknown:ENSG00000141946 known_pos_ctrl sequence

SEQ ID NO: 46848 - protein, 85 aa, unidentified; identical to SEQ ID NO: 15652
  REGION 1..85: note = Description of Unknown:ENSG00000141946 known_pos_ctrl sequence

SEQ ID NO: 46849 - protein, 85 aa, unidentified
  REGION 1..85: note = Description of Unknown:ENSG00000141946 known_pos_ctrl sequence
LGIDDVSSLQHYVQNNSHDDNGYRKLVGNNPSKFVGQQLKCNACRKLFSSKSRLQSHLRRHACQKPFECHSCGRAFGEKWKLDKH

SEQ ID NO: 46850 - protein, 85 aa, unidentified; identical to SEQ ID NO: 15654
  REGION 1..85: note = Description of Unknown:ENSG00000141946 known_pos_ctrl sequence

SEQ ID NO: 46851 - protein, 85 aa, unidentified; identical to SEQ ID NO: 15655
  REGION 1..85: note = Description of Unknown:ENSG00000141946 known_pos_ctrl sequence

SEQ ID NO: 46852 - protein, 85 aa, unidentified; identical to SEQ ID NO: 15656
  REGION 1..85: note = Description of Unknown:ENSG00000141946 known_pos_ctrl sequence

SEQ ID NO: 46853 - protein, 85 aa, unidentified; identical to SEQ ID NO: 15657
  REGION 1..85: note = Description of Unknown:ENSG00000142182 known_pos_ctrl sequence

SEQ ID NO: 46854 - protein, 85 aa, unidentified; identical to SEQ ID NO: 15658
  REGION 1..85: note = Description of Unknown:ENSG00000142182 known_pos_ctrl sequence

SEQ ID NO: 46855 - protein, 85 aa, unidentified; identical to SEQ ID NO: 15659
  REGION 1..85: note = Description of Unknown:ENSG00000142182 known_pos_ctrl sequence

SEQ ID NO: 46856 - protein, 85 aa, unidentified; identical to SEQ ID NO: 15660
  REGION 1..85: note = Description of Unknown:ENSG00000142182 known_pos_ctrl sequence

SEQ ID NO: 46857 - protein, 84 aa, unidentified; identical to SEQ ID NO: 15661
  REGION 1..84: note = Description of Unknown:ENSG00000142182 known_pos_ctrl sequence

SEQ ID NO: 46858 - protein, 85 aa, unidentified; identical to SEQ ID NO: 15662
  REGION 1..85: note = Description of Unknown:ENSG00000142182 known_pos_ctrl sequence

SEQ ID NO: 46859 - protein, 85 aa, unidentified; identical to SEQ ID NO: 15663
  REGION 1..85: note = Description of Unknown:ENSG00000142182 known_pos_ctrl sequence

SEQ ID NO: 46860 - protein, 85 aa, unidentified; identical to SEQ ID NO: 15664
  REGION 1..85: note = Description of Unknown:ENSG00000142182 known_pos_ctrl sequence

SEQ ID NO: 46861 - protein, 85 aa, unidentified; identical to SEQ ID NO: 15665
  REGION 1..85: note = Description of Unknown:ENSG00000142182 known_pos_ctrl sequence

SEQ ID NO: 46862 - protein, 85 aa, unidentified; identical to SEQ ID NO: 15666
  REGION 1..85: note = Description of Unknown:ENSG00000168769 known_pos_ctrl sequence

SEQ ID NO: 46863 - protein, 84 aa, unidentified; identical to SEQ ID NO: 15667
  REGION 1..84: note = Description of Unknown:ENSG00000168769 known_pos_ctrl sequence

SEQ ID NO: 46864 - protein, 85 aa, unidentified; identical to SEQ ID NO: 15668
  REGION 1..85: note = Description of Unknown:ENSG00000168769 known_pos_ctrl sequence

SEQ ID NO: 46865 - protein, 85 aa, unidentified; identical to SEQ ID NO: 15669
  REGION 1..85: note = Description of Unknown:ENSG00000106462 known_pos_ctrl sequence

SEQ ID NO: 46866 - protein, 85 aa, unidentified; identical to SEQ ID NO: 15670
  REGION 1..85: note = Description of Unknown:ENSG00000106462 known_pos_ctrl sequence

SEQ ID NO: 46867 - protein, 85 aa, unidentified; identical to SEQ ID NO: 15671
  REGION 1..85: note = Description of Unknown:ENSG00000106462 known_pos_ctrl sequence

SEQ ID NO: 46868 - protein, 85 aa, unidentified; identical to SEQ ID NO: 15672
  REGION 1..85: note = Description of Unknown:ENSG00000106462 known_pos_ctrl sequence

SEQ ID NO: 46869 - protein, 85 aa, unidentified; identical to SEQ ID NO: 15673
  REGION 1..85: note = Description of Unknown:ENSG00000106462 known_pos_ctrl sequence

SEQ ID NO: 46870 - protein, 85 aa, unidentified; identical to SEQ ID NO: 15674
  REGION 1..85: note = Description of Unknown:ENSG00000106462 known_pos_ctrl sequence

SEQ ID NO: 46871 - protein, 85 aa, unidentified; identical to SEQ ID NO: 15675
  REGION 1..85: note = Description of Unknown:ENSG00000106462 known_pos_ctrl sequence

SEQ ID NO: 46872 - protein, 85 aa, unidentified; identical to SEQ ID NO: 15676
  REGION 1..85: note = Description of Unknown:ENSG00000106462 known_pos_ctrl sequence

SEQ ID NO: 46873 - protein, 85 aa, unidentified; identical to SEQ ID NO: 15677
  REGION 1..85: note = Description of Unknown:ENSG00000106462 known_pos_ctrl sequence

SEQ ID NO: 46874 - protein, 85 aa, unidentified; identical to SEQ ID NO: 15678
  REGION 1..85: note = Description of Unknown:ENSG00000106462 known_pos_ctrl sequence

SEQ ID NO: 46875 - protein, 85 aa, unidentified; identical to SEQ ID NO: 15679
  REGION 1..85: note = Description of Unknown:ENSG00000106462 known_pos_ctrl sequence

SEQ ID NO: 46876 - protein, 85 aa, unidentified; identical to SEQ ID NO: 15680
  REGION 1..85: note = Description of Unknown:ENSG00000106462 known_pos_ctrl sequence

SEQ ID NO: 46877 - protein, 85 aa, unidentified; identical to SEQ ID NO: 15681
  REGION 1..85: note = Description of Unknown:ENSG00000106462 known_pos_ctrl sequence

SEQ ID NO: 46878 - protein, 85 aa, unidentified
  REGION 1..85: note = Description of Unknown:ENSG00000106462 known_pos_ctrl sequence
LKKDGSSNHVYNYQPCDHPRQPCDSSCPCVIAQNFCEKFCQCSSECQNRFPGCRCKAQCNTKQCPCYLAVRECDPDLCLTCGAAD

SEQ ID NO: 46879 - protein, 85 aa, unidentified; identical to SEQ ID NO: 15683
  REGION 1..85: note = Description of Unknown:ENSG00000106462 known_pos_ctrl sequence

SEQ ID NO: 46880 - protein, 85 aa, unidentified; identical to SEQ ID NO: 15684
  REGION 1..85: note = Description of Unknown:ENSG00000204371 known_pos_ctrl sequence

SEQ ID NO: 46881 - protein, 85 aa, unidentified; identical to SEQ ID NO: 15685
  REGION 1..85: note = Description of Unknown:ENSG00000204371 known_pos_ctrl sequence

SEQ ID NO: 46882 - protein, 85 aa, unidentified; identical to SEQ ID NO: 15686
  REGION 1..85: note = Description of Unknown:ENSG00000204371 known_pos_ctrl sequence

SEQ ID NO: 46883 - protein, 85 aa, unidentified; identical to SEQ ID NO: 15687
  REGION 1..85: note = Description of Unknown:ENSG00000204371 known_pos_ctrl sequence

SEQ ID NO: 46884 - protein, 85 aa, unidentified; identical to SEQ ID NO: 15688
  REGION 1..85: note = Description of Unknown:ENSG00000204371 known_pos_ctrl sequence

SEQ ID NO: 46885 - protein, 85 aa, unidentified; identical to SEQ ID NO: 15689
  REGION 1..85: note = Description of Unknown:ENSG00000204371 known_pos_ctrl sequence

SEQ ID NO: 46886 - protein, 85 aa, unidentified; identical to SEQ ID NO: 15690
  REGION 1..85: note = Description of Unknown:ENSG00000204371 known_pos_ctrl sequence

SEQ ID NO: 46887 - protein, 85 aa, unidentified; identical to SEQ ID NO: 15691
  REGION 1..85: note = Description of Unknown:ENSG00000204371 known_pos_ctrl sequence

SEQ ID NO: 46888 - protein, 85 aa, unidentified; identical to SEQ ID NO: 15692
  REGION 1..85: note = Description of Unknown:ENSG00000204371 known_pos_ctrl sequence

SEQ ID NO: 46889 - protein, 85 aa, unidentified; identical to SEQ ID NO: 15693
  REGION 1..85: note = Description of Unknown:ENSG00000204371 known_pos_ctrl sequence

SEQ ID NO: 46890 - protein, 85 aa, unidentified; identical to SEQ ID NO: 15694
  REGION 1..85: note = Description of Unknown:ENSG00000204371 known_pos_ctrl sequence

SEQ ID NO: 46891 - protein, 85 aa, unidentified; identical to SEQ ID NO: 15695
  REGION 1..85: note = Description of Unknown:ENSG00000204371 known_pos_ctrl sequence

SEQ ID NO: 46892 - protein, 85 aa, unidentified; identical to SEQ ID NO: 15696
  REGION 1..85: note = Description of Unknown:ENSG00000204371 known_pos_ctrl sequence

SEQ ID NO: 46893 - protein, 85 aa, unidentified; identical to SEQ ID NO: 15697
  REGION 1..85: note = Description of Unknown:ENSG00000204371 known_pos_ctrl sequence

SEQ ID NO: 46894 - protein, 84 aa, unidentified
  REGION 1..84: note = Description of Unknown:ENSG00000204371 known_pos_ctrl sequence
LHQDLRFPRIAFFSSRDIRTGEELGFDYGDRFWDIKSKYFTCQCGSEKCKHSAEAIALEQSRLARLDPHPELLPELGSLPPVNT

SEQ ID NO: 46895 - protein, 85 aa, unidentified; identical to SEQ ID NO: 15699
  REGION 1..85: note = Description of Unknown:ENSG00000204371 known_pos_ctrl sequence

SEQ ID NO: 46896 - protein, 85 aa, unidentified; identical to SEQ ID NO: 15700
  REGION 1..85: note = Description of Unknown:ENSG00000204371 known_pos_ctrl sequence

SEQ ID NO: 46897 - protein, 85 aa, unidentified; identical to SEQ ID NO: 15701
  REGION 1..85: note = Description of Unknown:ENSG00000204371 known_pos_ctrl sequence

SEQ ID NO: 46898 - protein, 85 aa, unidentified; identical to SEQ ID NO: 15702
  REGION 1..85: note = Description of Unknown:ENSG00000204371 known_pos_ctrl sequence

SEQ ID NO: 46899 - protein, 85 aa, unidentified; identical to SEQ ID NO: 15703
  REGION 1..85: note = Description of Unknown:ENSG00000204371 known_pos_ctrl sequence

SEQ ID NO: 46900 - protein, 85 aa, unidentified; identical to SEQ ID NO: 15704
  REGION 1..85: note = Description of Unknown:ENSG00000204371 known_pos_ctrl sequence

SEQ ID NO: 46901 - protein, 85 aa, unidentified; identical to SEQ ID NO: 15705
  REGION 1..85: note = Description of Unknown:ENSG00000204371 known_pos_ctrl sequence

SEQ ID NO: 46902 - protein, 85 aa, unidentified; identical to SEQ ID NO: 15706
  REGION 1..85: note = Description of Unknown:ENSG00000204371 known_pos_ctrl sequence

SEQ ID NO: 46903 - protein, 85 aa, unidentified; identical to SEQ ID NO: 15707
  REGION 1..85: note = Description of Unknown:ENSG00000204371 known_pos_ctrl sequence

SEQ ID NO: 46904 - protein, 85 aa, unidentified; identical to SEQ ID NO: 15708
  REGION 1..85: note = Description of Unknown:ENSG00000204371 known_pos_ctrl sequence

SEQ ID NO: 46905 - protein, 85 aa, unidentified; identical to SEQ ID NO: 15709
  REGION 1..85: note = Description of Unknown:ENSG00000204371 known_pos_ctrl sequence

SEQ ID NO: 46906 - protein, 85 aa, unidentified; identical to SEQ ID NO: 15710
  REGION 1..85: note = Description of Unknown:ENSG00000204371 known_pos_ctrl sequence

SEQ ID NO: 46907 - protein, 85 aa, unidentified; identical to SEQ ID NO: 15711
  REGION 1..85: note = Description of Unknown:ENSG00000204371 known_pos_ctrl sequence

SEQ ID NO: 46908 - protein, 85 aa, unidentified; identical to SEQ ID NO: 15712
  REGION 1..85: note = Description of Unknown:ENSG00000088305 known_pos_ctrl sequence

SEQ ID NO: 46909 - protein, 85 aa, unidentified; identical to SEQ ID NO: 15713
  REGION 1..85: note = Description of Unknown:ENSG00000088305 known_pos_ctrl sequence

SEQ ID NO: 46910 - protein, 85 aa, unidentified; identical to SEQ ID NO: 15714
  REGION 1..85: note = Description of Unknown:ENSG00000088305 known_pos_ctrl sequence

SEQ ID NO: 46911 - protein, 85 aa, unidentified; identical to SEQ ID NO: 15715
  REGION 1..85: note = Description of Unknown:ENSG00000088305 known_pos_ctrl sequence

SEQ ID NO: 46912 - protein, 85 aa, unidentified; identical to SEQ ID NO: 15716
  REGION 1..85: note = Description of Unknown:ENSG00000088305 known_pos_ctrl sequence

SEQ ID NO: 46913 - protein, 85 aa, unidentified; identical to SEQ ID NO: 15717
  REGION 1..85: note = Description of Unknown:ENSG00000088305 known_pos_ctrl sequence

SEQ ID NO: 46914 - protein, 85 aa, unidentified; identical to SEQ ID NO: 15718
  REGION 1..85: note = Description of Unknown:ENSG00000088305 known_pos_ctrl sequence

SEQ ID NO: 46915 - protein, 85 aa, unidentified; identical to SEQ ID NO: 15719
  REGION 1..85: note = Description of Unknown:ENSG00000088305 known_pos_ctrl sequence

SEQ ID NO: 46916 - protein, 85 aa, unidentified; identical to SEQ ID NO: 15720
  REGION 1..85: note = Description of Unknown:ENSG00000088305 known_pos_ctrl sequence

SEQ ID NO: 46917 - protein, 85 aa, unidentified; identical to SEQ ID NO: 15721
  REGION 1..85: note = Description of Unknown:ENSG00000088305 known_pos_ctrl sequence

SEQ ID NO: 46918 - protein, 85 aa, unidentified; identical to SEQ ID NO: 15722
  REGION 1..85: note = Description of Unknown:ENSG00000088305 known_pos_ctrl sequence

SEQ ID NO: 46919 - protein, 85 aa, unidentified; identical to SEQ ID NO: 15723
  REGION 1..85: note = Description of Unknown:ENSG00000088305 known_pos_ctrl sequence

SEQ ID NO: 46920 - protein, 85 aa, unidentified; identical to SEQ ID NO: 15724
  REGION 1..85: note = Description of Unknown:ENSG00000088305 known_pos_ctrl sequence

SEQ ID NO: 46921 - protein, 85 aa, unidentified; identical to SEQ ID NO: 15725
  REGION 1..85: note = Description of Unknown:ENSG00000088305 known_pos_ctrl sequence

SEQ ID NO: 46922 - protein, 85 aa, unidentified; identical to SEQ ID NO: 15726
  REGION 1..85: note = Description of Unknown:ENSG00000088305 known_pos_ctrl sequence

SEQ ID NO: 46923 - protein, 85 aa, unidentified; identical to SEQ ID NO: 15727
  REGION 1..85: note = Description of Unknown:ENSG00000088305 known_pos_ctrl sequence

SEQ ID NO: 46924 - protein, 85 aa, unidentified; identical to SEQ ID NO: 15728
  REGION 1..85: note = Description of Unknown:ENSG00000088305 known_pos_ctrl sequence

SEQ ID NO: 46925 - protein, 85 aa, unidentified; identical to SEQ ID NO: 15729
  REGION 1..85: note = Description of Unknown:ENSG00000088305 known_pos_ctrl sequence

SEQ ID NO: 46926 - protein, 85 aa, unidentified; identical to SEQ ID NO: 15730
  REGION 1..85: note = Description of Unknown:ENSG00000204371 known_pos_ctrl sequence

SEQ ID NO: 46927 - protein, 85 aa, unidentified; identical to SEQ ID NO: 15731
  REGION 1..85: note = Description of Unknown:ENSG00000204371 known_pos_ctrl sequence

SEQ ID NO: 46928 - protein, 85 aa, unidentified; identical to SEQ ID NO: 15732
  REGION 1..85: note = Description of Unknown:ENSG00000204371 known_pos_ctrl sequence

SEQ ID NO: 46929 - protein, 85 aa, unidentified; identical to SEQ ID NO: 15733
  REGION 1..85: note = Description of Unknown:ENSG00000204371 known_pos_ctrl sequence

SEQ ID NO: 46930 - protein, 85 aa, unidentified; identical to SEQ ID NO: 15734
  REGION 1..85: note = Description of Unknown:ENSG00000204371 known_pos_ctrl sequence

SEQ ID NO: 46931 - protein, 85 aa, unidentified; identical to SEQ ID NO: 15735
  REGION 1..85: note = Description of Unknown:ENSG00000204371 known_pos_ctrl sequence

SEQ ID NO: 46932 - protein, 85 aa, unidentified; identical to SEQ ID NO: 15736
  REGION 1..85: note = Description of Unknown:ENSG00000204371 known_pos_ctrl sequence

SEQ ID NO: 46933 - protein, 85 aa, unidentified
  REGION 1..85: note = Description of Unknown:ENSG00000204371 known_pos_ctrl sequence
LQHCTCVDDCSSSNCLCGQLSIRCWYDKDGRLLQEFNKIEPPLIFECNQACSCWRNCKNRVVQSGIKVRLQLYRTAKMGWGVRAL

SEQ ID NO: 46934 - protein, 85 aa, unidentified; identical to SEQ ID NO: 15738
  REGION 1..85: note = Description of Unknown:ENSG00000204371 known_pos_ctrl sequence

SEQ ID NO: 46935 - protein, 85 aa, unidentified; identical to SEQ ID NO: 15739
  REGION 1..85: note = Description of Unknown:ENSG00000204371 known_pos_ctrl sequence

SEQ ID NO: 46936 - protein, 85 aa, unidentified; identical to SEQ ID NO: 15740
  REGION 1..85: note = Description of Unknown:ENSG00000204371 known_pos_ctrl sequence

SEQ ID NO: 46937 - protein, 85 aa, unidentified; identical to SEQ ID NO: 15741
  REGION 1..85: note = Description of Unknown:ENSG00000204371 known_pos_ctrl sequence

SEQ ID NO: 46938 - protein, 85 aa, unidentified; identical to SEQ ID NO: 15742
  REGION 1..85: note = Description of Unknown:ENSG00000204371 known_pos_ctrl sequence

SEQ ID NO: 46939 - protein, 85 aa, unidentified; identical to SEQ ID NO: 15743
  REGION 1..85: note = Description of Unknown:ENSG00000204371 known_pos_ctrl sequence

SEQ ID NO: 46940 - protein, 85 aa, unidentified; identical to SEQ ID NO: 15744
  REGION 1..85: note = Description of Unknown:ENSG00000204371 known_pos_ctrl sequence

SEQ ID NO: 46941 - protein, 85 aa, unidentified; identical to SEQ ID NO: 15745
  REGION 1..85: note = Description of Unknown:ENSG00000204371 known_pos_ctrl sequence

SEQ ID NO: 46942 - protein, 85 aa, unidentified; identical to SEQ ID NO: 15746
  REGION 1..85: note = Description of Unknown:ENSG00000204371 known_pos_ctrl sequence

SEQ ID NO: 46943 - protein, 85 aa, unidentified
  REGION 1..85: note = Description of Unknown:ENSG00000204371 known_pos_ctrl sequence
LIFECNQACSCWRNCKNRVVQSGIKVRLQLYRTAKMGWGVRALQTIPQGTFICEYVGELISDAEADVREDDSYLFDLDNKDGEVY

SEQ ID NO: 46944 - protein, 85 aa, unidentified; identical to SEQ ID NO: 15748
  REGION 1..85: note = Description of Unknown:ENSG00000204371 known_pos_ctrl sequence

SEQ ID NO: 46945 - protein, 85 aa, unidentified; identical to SEQ ID NO: 15749
  REGION 1..85: note = Description of Unknown:ENSG00000101945 known_pos_ctrl sequence

SEQ ID NO: 46946 - protein, 85 aa, unidentified; identical to SEQ ID NO: 15750
  REGION 1..85: note = Description of Unknown:ENSG00000101945 known_pos_ctrl sequence

SEQ ID NO: 46947 - protein, 85 aa, unidentified; identical to SEQ ID NO: 15751
  REGION 1..85: note = Description of Unknown:ENSG00000101945 known_pos_ctrl sequence

SEQ ID NO: 46948 - protein, 85 aa, unidentified; identical to SEQ ID NO: 15752
  REGION 1..85: note = Description of Unknown:ENSG00000101945 known_pos_ctrl sequence

SEQ ID NO: 46949 - protein, 84 aa, unidentified; identical to SEQ ID NO: 15753
  REGION 1..84: note = Description of Unknown:ENSG00000101945 known_pos_ctrl sequence

SEQ ID NO: 46950 - protein, 85 aa, unidentified; identical to SEQ ID NO: 15754
  REGION 1..85: note = Description of Unknown:ENSG00000101945 known_pos_ctrl sequence

SEQ ID NO: 46951 - protein, 85 aa, unidentified; identical to SEQ ID NO: 15755
  REGION 1..85: note = Description of Unknown:ENSG00000101945 known_pos_ctrl sequence

SEQ ID NO: 46952 - protein, 85 aa, unidentified; identical to SEQ ID NO: 15756
  REGION 1..85: note = Description of Unknown:ENSG00000101945 known_pos_ctrl sequence

SEQ ID NO: 46953 - protein, 85 aa, unidentified; identical to SEQ ID NO: 15757
  REGION 1..85: note = Description of Unknown:ENSG00000101945 known_pos_ctrl sequence

SEQ ID NO: 46954 - protein, 85 aa, unidentified; identical to SEQ ID NO: 15758
  REGION 1..85: note = Description of Unknown:ENSG00000004487 known_pos_ctrl sequence

SEQ ID NO: 46955 - protein, 85 aa, unidentified; identical to SEQ ID NO: 15759
  REGION 1..85: note = Description of Unknown:ENSG00000004487 known_pos_ctrl sequence

SEQ ID NO: 46956 - protein, 85 aa, unidentified; identical to SEQ ID NO: 15760
  REGION 1..85: note = Description of Unknown:ENSG00000004487 known_pos_ctrl sequence

SEQ ID NO: 46957 - protein, 85 aa, unidentified; identical to SEQ ID NO: 15761
  REGION 1..85: note = Description of Unknown:ENSG00000004487 known_pos_ctrl sequence

SEQ ID NO: 46958 - protein, 85 aa, unidentified; identical to SEQ ID NO: 15762
  REGION 1..85: note = Description of Unknown:ENSG00000004487 known_pos_ctrl sequence

SEQ ID NO: 46959 - protein, 85 aa, unidentified; identical to SEQ ID NO: 15763
  REGION 1..85: note = Description of Unknown:ENSG00000004487 known_pos_ctrl sequence

SEQ ID NO: 46960 - protein, 85 aa, unidentified; identical to SEQ ID NO: 15764
  REGION 1..85: note = Description of Unknown:ENSG00000004487 known_pos_ctrl sequence

SEQ ID NO: 46961 - protein, 85 aa, unidentified; identical to SEQ ID NO: 15765
  REGION 1..85: note = Description of Unknown:ENSG00000004487 known_pos_ctrl sequence

SEQ ID NO: 46962 - protein, 85 aa, unidentified; identical to SEQ ID NO: 15766
  REGION 1..85: note = Description of Unknown:ENSG00000004487 known_pos_ctrl sequence

SEQ ID NO: 46963 - protein, 85 aa, unidentified; identical to SEQ ID NO: 15767
  REGION 1..85: note = Description of Unknown:ENSG00000004487 known_pos_ctrl sequence

SEQ ID NO: 46964 - protein, 84 aa, unidentified; identical to SEQ ID NO: 15768
  REGION 1..84: note = Description of Unknown:ENSG00000004487 known_pos_ctrl sequence

SEQ ID NO: 46965 - protein, 85 aa, unidentified
  REGION 1..85: note = Description of Unknown:ENSG00000004487 known_pos_ctrl sequence
LSGPAEVGPGAVGERTPRKKEPPRASPPGGLAEPPGSAGPQAGPTVVPGSATPMETGIAETPEGRRTSRRKRAKVEYREMDESLA

SEQ ID NO: 46966 - protein, 85 aa, unidentified; identical to SEQ ID NO: 15770
  REGION 1..85: note = Description of Unknown:ENSG00000004487 known_pos_ctrl sequence

SEQ ID NO: 46967 - protein, 85 aa, unidentified; identical to SEQ ID NO: 15771
  REGION 1..85: note = Description of Unknown:ENSG00000004487 known_pos_ctrl sequence

SEQ ID NO: 46968 - protein, 85 aa, unidentified; identical to SEQ ID NO: 15772
  REGION 1..85: note = Description of Unknown:ENSG00000004487 known_pos_ctrl sequence

SEQ ID NO: 46969 - protein, 85 aa, unidentified; identical to SEQ ID NO: 15773
  REGION 1..85: note = Description of Unknown:ENSG00000004487 known_pos_ctrl sequence

SEQ ID NO: 46970 - protein, 85 aa, unidentified; identical to SEQ ID NO: 15774
  REGION 1..85: note = Description of Unknown:ENSG00000004487 known_pos_ctrl sequence

SEQ ID NO: 46971 - protein, 85 aa, unidentified; identical to SEQ ID NO: 15775
  REGION 1..85: note = Description of Unknown:ENSG00000004487 known_pos_ctrl sequence

SEQ ID NO: 46972 - protein, 85 aa, unidentified; identical to SEQ ID NO: 15776
  REGION 1..85: note = Description of Unknown:ENSG00000004487 known_pos_ctrl sequence

SEQ ID NO: 46973 - protein, 85 aa, unidentified; identical to SEQ ID NO: 15777
  REGION 1..85: note = Description of Unknown:ENSG00000004487 known_pos_ctrl sequence

SEQ ID NO: 46974 - protein, 85 aa, unidentified; identical to SEQ ID NO: 15778
  REGION 1..85: note = Description of Unknown:ENSG00000088305 known_pos_ctrl sequence

SEQ ID NO: 46975 - protein, 84 aa, unidentified; identical to SEQ ID NO: 15779
  REGION 1..84: note = Description of Unknown:ENSG00000088305 known_pos_ctrl sequence

SEQ ID NO: 46976 - protein, 85 aa, unidentified; identical to SEQ ID NO: 15780
  REGION 1..85: note = Description of Unknown:ENSG00000088305 known_pos_ctrl sequence

SEQ ID NO: 46977 - protein, 85 aa, unidentified; identical to SEQ ID NO: 15781
  REGION 1..85: note = Description of Unknown:ENSG00000088305 known_pos_ctrl sequence

SEQ ID NO: 46978 - protein, 85 aa, unidentified; identical to SEQ ID NO: 15782
  REGION 1..85: note = Description of Unknown:ENSG00000088305 known_pos_ctrl sequence

SEQ ID NO: 46979 - protein, 85 aa, unidentified; identical to SEQ ID NO: 15783
  REGION 1..85: note = Description of Unknown:ENSG00000088305 known_pos_ctrl sequence

SEQ ID NO: 46980 - protein, 85 aa, unidentified; identical to SEQ ID NO: 15784
  REGION 1..85: note = Description of Unknown:ENSG00000088305 known_pos_ctrl sequence

SEQ ID NO: 46981 - protein, 85 aa, unidentified; identical to SEQ ID NO: 15785
  REGION 1..85: note = Description of Unknown:ENSG00000088305 known_pos_ctrl sequence

SEQ ID NO: 46982 - protein, 85 aa, unidentified; identical to SEQ ID NO: 15786
  REGION 1..85: note = Description of Unknown:ENSG00000088305 known_pos_ctrl sequence

SEQ ID NO: 46983 - protein, 85 aa, unidentified; identical to SEQ ID NO: 15787
  REGION 1..85: note = Description of Unknown:ENSG00000088305 known_pos_ctrl sequence

SEQ ID NO: 46984 - protein, 85 aa, unidentified; identical to SEQ ID NO: 15788
  REGION 1..85: note = Description of Unknown:ENSG00000088305 known_pos_ctrl sequence

SEQ ID NO: 46985 - protein, 85 aa, unidentified; identical to SEQ ID NO: 15789
  REGION 1..85: note = Description of Unknown:ENSG00000088305 known_pos_ctrl sequence

SEQ ID NO: 46986 - protein, 85 aa, unidentified; identical to SEQ ID NO: 15790
  REGION 1..85: note = Description of Unknown:ENSG00000088305 known_pos_ctrl sequence

SEQ ID NO: 46987 - protein, 85 aa, unidentified; identical to SEQ ID NO: 15791
  REGION 1..85: note = Description of Unknown:ENSG00000088305 known_pos_ctrl sequence

SEQ ID NO: 46988 - protein, 85 aa, unidentified; identical to SEQ ID NO: 15792
  REGION 1..85: note = Description of Unknown:ENSG00000101945 known_pos_ctrl sequence

SEQ ID NO: 46989 - protein, 85 aa, unidentified; identical to SEQ ID NO: 15793
  REGION 1..85: note = Description of Unknown:ENSG00000101945 known_pos_ctrl sequence

SEQ ID NO: 46990 - protein, 85 aa, unidentified; identical to SEQ ID NO: 15794
  REGION 1..85: note = Description of Unknown:ENSG00000101945 known_pos_ctrl sequence

SEQ ID NO: 46991 - protein, 85 aa, unidentified; identical to SEQ ID NO: 15795
  REGION 1..85: note = Description of Unknown:ENSG00000101945 known_pos_ctrl sequence

SEQ ID NO: 46992 - protein, 85 aa, unidentified; identical to SEQ ID NO: 15796
  REGION 1..85: note = Description of Unknown:ENSG00000101945 known_pos_ctrl sequence

SEQ ID NO: 46993 - protein, 85 aa, unidentified
  REGION 1..85: note = Description of Unknown:ENSG00000101945 known_pos_ctrl sequence
LVQKAKQRRALRRWEQELNAKRSHLGRITVENEVDLDGPPRAFVYINEYRVGEGITLNQVAVGCECQDCLWAPTGGCCPGASLHK

SEQ ID NO: 46994 - protein, 85 aa, unidentified; identical to SEQ ID NO: 15798
  REGION 1..85: note = Description of Unknown:ENSG00000101945 known_pos_ctrl sequence

SEQ ID NO: 46995 - protein, 85 aa, unidentified; identical to SEQ ID NO: 15799
  REGION 1..85: note = Description of Unknown:ENSG00000101945 known_pos_ctrl sequence

SEQ ID NO: 46996 - protein, 85 aa, unidentified; identical to SEQ ID NO: 15800
  REGION 1..85: note = Description of Unknown:ENSG00000204371 known_pos_ctrl sequence

SEQ ID NO: 46997 - protein, 85 aa, unidentified; identical to SEQ ID NO: 15801
  REGION 1..85: note = Description of Unknown:ENSG00000204371 known_pos_ctrl sequence

SEQ ID NO: 46998 - protein, 85 aa, unidentified; identical to SEQ ID NO: 15802
  REGION 1..85: note = Description of Unknown:ENSG00000204371 known_pos_ctrl sequence

SEQ ID NO: 46999 - protein, 85 aa, unidentified; identical to SEQ ID NO: 15803
  REGION 1..85: note = Description of Unknown:ENSG00000204371 known_pos_ctrl sequence

SEQ ID NO: 47000 - protein, 85 aa, unidentified; identical to SEQ ID NO: 15804
  REGION 1..85: note = Description of Unknown:ENSG00000204371 known_pos_ctrl sequence

SEQ ID NO: 47001 - protein, 85 aa, unidentified; identical to SEQ ID NO: 15805
  REGION 1..85: note = Description of Unknown:ENSG00000204371 known_pos_ctrl sequence

SEQ ID NO: 47002 - protein, 85 aa, unidentified; identical to SEQ ID NO: 15806
  REGION 1..85: note = Description of Unknown:ENSG00000204371 known_pos_ctrl sequence

SEQ ID NO: 47003 - protein, 85 aa, unidentified; identical to SEQ ID NO: 15807
  REGION 1..85: note = Description of Unknown:ENSG00000204371 known_pos_ctrl sequence

SEQ ID NO: 47004 - protein, 85 aa, unidentified; identical to SEQ ID NO: 15808
  REGION 1..85: note = Description of Unknown:ENSG00000204371 known_pos_ctrl sequence

SEQ ID NO: 47005 - protein, 85 aa, unidentified; identical to SEQ ID NO: 15809
  REGION 1..85: note = Description of Unknown:ENSG00000204371 known_pos_ctrl sequence

SEQ ID NO: 47006 - protein, 85 aa, unidentified; identical to SEQ ID NO: 15810
  REGION 1..85: note = Description of Unknown:ENSG00000204371 known_pos_ctrl sequence

SEQ ID NO: 47007 - protein, 85 aa, unidentified; identical to SEQ ID NO: 15811
  REGION 1..85: note = Description of Unknown:ENSG00000204371 known_pos_ctrl sequence

SEQ ID NO: 47008 - protein, 85 aa, unidentified; identical to SEQ ID NO: 15812
  REGION 1..85: note = Description of Unknown:ENSG00000204371 known_pos_ctrl sequence

SEQ ID NO: 47009 - protein, 85 aa, unidentified; identical to SEQ ID NO: 15813
  REGION 1..85: note = Description of Unknown:ENSG00000204371 known_pos_ctrl sequence

SEQ ID NO: 47010 - protein, 85 aa, unidentified; identical to SEQ ID NO: 15814
  REGION 1..85: note = Description of Unknown:ENSG00000204371 known_pos_ctrl sequence

SEQ ID NO: 47011 - protein, 85 aa, unidentified; identical to SEQ ID NO: 15815
  REGION 1..85: note = Description of Unknown:ENSG00000204371 known_pos_ctrl sequence

SEQ ID NO: 47012 - protein, 85 aa, unidentified; identical to SEQ ID NO: 15816
  REGION 1..85: note = Description of Unknown:ENSG00000204371 known_pos_ctrl sequence

SEQ ID NO: 47013 - protein, 85 aa, unidentified; identical to SEQ ID NO: 15817
  REGION 1..85: note = Description of Unknown:ENSG00000204371 known_pos_ctrl sequence

SEQ ID NO: 47014 - protein, 85 aa, unidentified; identical to SEQ ID NO: 15818
  REGION 1..85: note = Description of Unknown:ENSG00000204371 known_pos_ctrl sequence

SEQ ID NO: 47015 - protein, 85 aa, unidentified; identical to SEQ ID NO: 15819
  REGION 1..85: note = Description of Unknown:ENSG00000204371 known_pos_ctrl sequence

SEQ ID NO: 47016 - protein, 85 aa, unidentified; identical to SEQ ID NO: 15820
  REGION 1..85: note = Description of Unknown:ENSG00000204371 known_pos_ctrl sequence

SEQ ID NO: 47017 - protein, 85 aa, unidentified; identical to SEQ ID NO: 15821
  REGION 1..85: note = Description of Unknown:ENSG00000204371 known_pos_ctrl sequence

SEQ ID NO: 47018 - protein, 85 aa, unidentified; identical to SEQ ID NO: 15822
  REGION 1..85: note = Description of Unknown:ENSG00000204371 known_pos_ctrl sequence

SEQ ID NO: 47019 - protein, 85 aa, unidentified; identical to SEQ ID NO: 15823
  REGION 1..85: note = Description of Unknown:ENSG00000204371 known_pos_ctrl sequence

SEQ ID NO: 47020 - protein, 85 aa, unidentified
  REGION 1..85: note = Description of Unknown:ENSG00000204371 known_pos_ctrl sequence
LSRGANPELRNKEGDTAWDLTPERSDVWFALQLNRKLRLGVGNRAIRTEKIICRDVARGYENVPIPCVNGVDGEPCPEDYKYISE

SEQ ID NO: 47021 - protein, 85 aa, unidentified; identical to SEQ ID NO: 15825
  REGION 1..85: note = Description of Unknown:ENSG00000204371 known_pos_ctrl sequence

SEQ ID NO: 47022 - protein, 85 aa, unidentified; identical to SEQ ID NO: 15826
  REGION 1..85: note = Description of Unknown:ENSG00000204371 known_pos_ctrl sequence

SEQ ID NO: 47023 - protein, 85 aa, unidentified; identical to SEQ ID NO: 15827
  REGION 1..85: note = Description of Unknown:ENSG00000204371 known_pos_ctrl sequence

SEQ ID NO: 47024 - protein, 84 aa, unidentified; identical to SEQ ID NO: 15828
  REGION 1..84: note = Description of Unknown:ENSG00000168769 known_pos_ctrl sequence

SEQ ID NO: 47025 - protein, 85 aa, unidentified; identical to SEQ ID NO: 15829
  REGION 1..85: note = Description of Unknown:ENSG00000168769 known_pos_ctrl sequence

SEQ ID NO: 47026 - protein, 85 aa, unidentified; identical to SEQ ID NO: 15830
  REGION 1..85: note = Description of Unknown:ENSG00000204371 known_pos_ctrl sequence

SEQ ID NO: 47027 - protein, 85 aa, unidentified; identical to SEQ ID NO: 15831
  REGION 1..85: note = Description of Unknown:ENSG00000204371 known_pos_ctrl sequence

SEQ ID NO: 47028 - protein, 85 aa, unidentified; identical to SEQ ID NO: 15832
  REGION 1..85: note = Description of Unknown:ENSG00000204371 known_pos_ctrl sequence

SEQ ID NO: 47029 - protein, 85 aa, unidentified
  REGION 1..85: note = Description of Unknown:ENSG00000204371 known_pos_ctrl sequence
LGPGREALEKALVIQESERRKKLRFHPRQLYLSVKQGELQKVILMLLDNLDPNFQSDQQSKRTPLHAAAQKGSVEICHVLLQAGA

SEQ ID NO: 47030 - protein, 85 aa, unidentified; identical to SEQ ID NO: 15834
  REGION 1..85: note = Description of Unknown:ENSG00000204371 known_pos_ctrl sequence

SEQ ID NO: 47031 - protein, 85 aa, unidentified; identical to SEQ ID NO: 15835
  REGION 1..85: note = Description of Unknown:ENSG00000204371 known_pos_ctrl sequence

SEQ ID NO: 47032 - protein, 85 aa, unidentified; identical to SEQ ID NO: 15836
  REGION 1..85: note = Description of Unknown:ENSG00000204371 known_pos_ctrl sequence

SEQ ID NO: 47033 - protein, 85 aa, unidentified; identical to SEQ ID NO: 15837
  REGION 1..85: note = Description of Unknown:ENSG00000204371 known_pos_ctrl sequence

SEQ ID NO: 47034 - protein, 85 aa, unidentified; identical to SEQ ID NO: 15838
  REGION 1..85: note = Description of Unknown:ENSG00000204371 known_pos_ctrl sequence

SEQ ID NO: 47035 - protein, 85 aa, unidentified; identical to SEQ ID NO: 15839
  REGION 1..85: note = Description of Unknown:ENSG00000204371 known_pos_ctrl sequence

SEQ ID NO: 47036 - protein, 85 aa, unidentified; identical to SEQ ID NO: 15840
  REGION 1..85: note = Description of Unknown:ENSG00000204371 known_pos_ctrl sequence

SEQ ID NO: 47037 - protein, 85 aa, unidentified; identical to SEQ ID NO: 15841
  REGION 1..85: note = Description of Unknown:ENSG00000204371 known_pos_ctrl sequence

SEQ ID NO: 47038 - protein, 85 aa, unidentified; identical to SEQ ID NO: 15842
  REGION 1..85: note = Description of Unknown:ENSG00000204371 known_pos_ctrl sequence

SEQ ID NO: 47039 - protein, 85 aa, unidentified; identical to SEQ ID NO: 15843
  REGION 1..85: note = Description of Unknown:ENSG00000204371 known_pos_ctrl sequence

SEQ ID NO: 47040 - protein, 85 aa, unidentified; identical to SEQ ID NO: 15844
  REGION 1..85: note = Description of Unknown:ENSG00000204371 known_pos_ctrl sequence

SEQ ID NO: 47041 - protein, 85 aa, unidentified; identical to SEQ ID NO: 15845
  REGION 1..85: note = Description of Unknown:ENSG00000204371 known_pos_ctrl sequence

SEQ ID NO: 47042 - protein, 85 aa, unidentified; identical to SEQ ID NO: 15846
  REGION 1..85: note = Description of Unknown:ENSG00000204371 known_pos_ctrl sequence

SEQ ID NO: 47043 - protein, 85 aa, unidentified; identical to SEQ ID NO: 15847
  REGION 1..85: note = Description of Unknown:ENSG00000204371 known_pos_ctrl sequence

SEQ ID NO: 47044 - protein, 85 aa, unidentified; identical to SEQ ID NO: 15848
  REGION 1..85: note = Description of Unknown:ENSG00000204371 known_pos_ctrl sequence

SEQ ID NO: 47045 - protein, 85 aa, unidentified; identical to SEQ ID NO: 15849
  REGION 1..85: note = Description of Unknown:ENSG00000142182 known_pos_ctrl sequence

SEQ ID NO: 47046 - protein, 85 aa, unidentified; identical to SEQ ID NO: 15850
  REGION 1..85: note = Description of Unknown:ENSG00000142182 known_pos_ctrl sequence

SEQ ID NO: 47047 - protein, 85 aa, unidentified; identical to SEQ ID NO: 15851
  REGION 1..85: note = Description of Unknown:ENSG00000142182 known_pos_ctrl sequence

SEQ ID NO: 47048 - protein, 85 aa, unidentified; identical to SEQ ID NO: 15852
  REGION 1..85: note = Description of Unknown:ENSG00000142182 known_pos_ctrl sequence

SEQ ID NO: 47049 - protein, 85 aa, unidentified; identical to SEQ ID NO: 15853
  REGION 1..85: note = Description of Unknown:ENSG00000142182 known_pos_ctrl sequence

SEQ ID NO: 47050 - protein, 85 aa, unidentified
  REGION 1..85: note = Description of Unknown:ENSG00000142182 known_pos_ctrl sequence
LCLPSSRSGLLQRRRKWRSQLKAFYDRESENPLEMFETVPVWRRQPVRVLSLFEDIKKELTSLGFLESGSDPGQLKHVVDVTDTV

SEQ ID NO: 47051 - protein, 85 aa, unidentified; identical to SEQ ID NO: 15855
  REGION 1..85: note = Description of Unknown:ENSG00000119772 known_pos_ctrl sequence

SEQ ID NO: 47052 - protein, 85 aa, unidentified; identical to SEQ ID NO: 15856
  REGION 1..85: note = Description of Unknown:ENSG00000119772 known_pos_ctrl sequence

SEQ ID NO: 47053 - protein, 85 aa, unidentified; identical to SEQ ID NO: 15857
  REGION 1..85: note = Description of Unknown:ENSG00000119772 known_pos_ctrl sequence

SEQ ID NO: 47054 - protein, 85 aa, unidentified; identical to SEQ ID NO: 15858
  REGION 1..85: note = Description of Unknown:ENSG00000119772 known_pos_ctrl sequence

SEQ ID NO: 47055 - protein, 85 aa, unidentified; identical to SEQ ID NO: 15859
  REGION 1..85: note = Description of Unknown:ENSG00000119772 known_pos_ctrl sequence

SEQ ID NO: 47056 - protein, 85 aa, unidentified
  REGION 1..85: note = Description of Unknown:ENSG00000119772 known_pos_ctrl sequence
LKDLGIQVDRYIASEVCEDSITVGMVRHQGKIMYVGDVRSVTQKHIQEWGPFDLVIGGSPCNDLSIVNPARKGLYEGTGRLFFEF

SEQ ID NO: 47057 - protein, 85 aa, unidentified; identical to SEQ ID NO: 15861
  REGION 1..85: note = Description of Unknown:ENSG00000119772 known_pos_ctrl sequence

SEQ ID NO: 47058 - protein, 85 aa, unidentified; identical to SEQ ID NO: 15862
  REGION 1..85: note = Description of Unknown:ENSG00000119772 known_pos_ctrl sequence

SEQ ID NO: 47059 - protein, 85 aa, unidentified; identical to SEQ ID NO: 15863
  REGION 1..85: note = Description of Unknown:ENSG00000119772 known_pos_ctrl sequence

SEQ ID NO: 47060 - protein, 85 aa, unidentified; identical to SEQ ID NO: 15864
  REGION 1..85: note = Description of Unknown:ENSG00000119772 known_pos_ctrl sequence

SEQ ID NO: 47061 - protein, 85 aa, unidentified; identical to SEQ ID NO: 15865
  REGION 1..85: note = Description of Unknown:ENSG00000119772 known_pos_ctrl sequence

SEQ ID NO: 47062 - protein, 85 aa, unidentified
  REGION 1..85: note = Description of Unknown:ENSG00000119772 known_pos_ctrl sequence
LECAYQYDDDGYQSYCTICCGGREVLMCGNNNCCRCFCVECVDLLVGPGAAQAAIKEDPWNCYMCGHKGTYGLLRRREDWPSRLQ

SEQ ID NO: 47063 - protein, 85 aa, unidentified; identical to SEQ ID NO: 15867
  REGION 1..85: note = Description of Unknown:ENSG00000119772 known_pos_ctrl sequence

SEQ ID NO: 47064 - protein, 85 aa, unidentified; identical to SEQ ID NO: 15868
  REGION 1..85: note = Description of Unknown:ENSG00000119772 known_pos_ctrl sequence

SEQ ID NO: 47065 - protein, 85 aa, unidentified; identical to SEQ ID NO: 15869
  REGION 1..85: note = Description of Unknown:ENSG00000119772 known_pos_ctrl sequence

SEQ ID NO: 47066 - protein, 85 aa, unidentified; identical to SEQ ID NO: 15870
  REGION 1..85: note = Description of Unknown:ENSG00000088305 known_pos_ctrl sequence

SEQ ID NO: 47067 - protein, 85 aa, unidentified; identical to SEQ ID NO: 15871
  REGION 1..85: note = Description of Unknown:ENSG00000088305 known_pos_ctrl sequence

SEQ ID NO: 47068 - protein, 85 aa, unidentified; identical to SEQ ID NO: 15872
  REGION 1..85: note = Description of Unknown:ENSG00000088305 known_pos_ctrl sequence

SEQ ID NO: 47069 - protein, 85 aa, unidentified
  REGION 1..85: note = Description of Unknown:ENSG00000088305 known_pos_ctrl sequence
LEWAHGGFKPTGIEGLKPNNTQPENKTRRRTADDSATSDYCPAPKRLKTNCYNNGKDRGDEDQSREQMASDVANNKSSLEDGCLS

SEQ ID NO: 47070 - protein, 85 aa, unidentified; identical to SEQ ID NO: 15874
  REGION 1..85: note = Description of Unknown:ENSG00000088305 known_pos_ctrl sequence

SEQ ID NO: 47071 - protein, 85 aa, unidentified; identical to SEQ ID NO: 15875
  REGION 1..85: note = Description of Unknown:ENSG00000088305 known_pos_ctrl sequence

SEQ ID NO: 47072 - protein, 85 aa, unidentified; identical to SEQ ID NO: 15876
  REGION 1..85: note = Description of Unknown:ENSG00000088305 known_pos_ctrl sequence

SEQ ID NO: 47073 - protein, 85 aa, unidentified; identical to SEQ ID NO: 15877
  REGION 1..85: note = Description of Unknown:ENSG00000088305 known_pos_ctrl sequence

SEQ ID NO: 47074 - protein, 85 aa, unidentified; identical to SEQ ID NO: 15878
  REGION 1..85: note = Description of Unknown:ENSG00000088305 known_pos_ctrl sequence

SEQ ID NO: 47075 - protein, 85 aa, unidentified; identical to SEQ ID NO: 15879
  REGION 1..85: note = Description of Unknown:ENSG00000088305 known_pos_ctrl sequence

SEQ ID NO: 47076 - protein, 85 aa, unidentified; identical to SEQ ID NO: 15880
  REGION 1..85: note = Description of Unknown:ENSG00000088305 known_pos_ctrl sequence

SEQ ID NO: 47077 - protein, 85 aa, unidentified; identical to SEQ ID NO: 15881
  REGION 1..85: note = Description of Unknown:ENSG00000088305 known_pos_ctrl sequence

SEQ ID NO: 47078 - protein, 85 aa, unidentified; identical to SEQ ID NO: 15882
  REGION 1..85: note = Description of Unknown:ENSG00000088305 known_pos_ctrl sequence

SEQ ID NO: 47079 - protein, 85 aa, unidentified; identical to SEQ ID NO: 15883
  REGION 1..85: note = Description of Unknown:ENSG00000088305 known_pos_ctrl sequence

SEQ ID NO: 47080 - protein, 85 aa, unidentified; identical to SEQ ID NO: 15884
  REGION 1..85: note = Description of Unknown:ENSG00000088305 known_pos_ctrl sequence

SEQ ID NO: 47081 - protein, 85 aa, unidentified; identical to SEQ ID NO: 15885
  REGION 1..85: note = Description of Unknown:ENSG00000168769 known_pos_ctrl sequence

SEQ ID NO: 47082 - protein, 85 aa, unidentified; identical to SEQ ID NO: 15886
  REGION 1..85: note = Description of Unknown:ENSG00000168769 known_pos_ctrl sequence

SEQ ID NO: 47083 - protein, 85 aa, unidentified; identical to SEQ ID NO: 15887
  REGION 1..85: note = Description of Unknown:ENSG00000168769 known_pos_ctrl sequence

SEQ ID NO: 47084 - protein, 85 aa, unidentified
  REGION 1..85: note = Description of Unknown:ENSG00000168769 known_pos_ctrl sequence
LKEGRPFSGVTACLDFCAHAHRDLHNMQNGSTLVCTLTREDNREFGGKPEDEQLHVLPLYKVSDVDEFGSVEAQEEKKRSGAIQV

SEQ ID NO: 47085 - protein, 85 aa, unidentified
  REGION 1..85: note = Description of Unknown:ENSG00000168769 known_pos_ctrl sequence
LSSFRRKVRMLAEPVKTCRQRKLEAKKAAAEKLSSLENSSNKNEKEKSAPSRTKQTENASQAKQLAELLRLSGPVMQQSQQPQPL

SEQ ID NO: 47086 - protein, 85 aa, unidentified; identical to SEQ ID NO: 15890
  REGION 1..85: note = Description of Unknown:ENSG00000168769 known_pos_ctrl sequence

SEQ ID NO: 47087 - protein, 85 aa, unidentified; identical to SEQ ID NO: 15891
  REGION 1..85: note = Description of Unknown:ENSG00000168769 known_pos_ctrl sequence

SEQ ID NO: 47088 - protein, 85 aa, unidentified; identical to SEQ ID NO: 15892
  REGION 1..85: note = Description of Unknown:ENSG00000168769 known_pos_ctrl sequence

SEQ ID NO: 47089 - protein, 85 aa, unidentified; identical to SEQ ID NO: 15893
  REGION 1..85: note = Description of Unknown:ENSG00000168769 known_pos_ctrl sequence

SEQ ID NO: 47090 - protein, 85 aa, unidentified; identical to SEQ ID NO: 15894
  REGION 1..85: note = Description of Unknown:ENSG00000168769 known_pos_ctrl sequence

SEQ ID NO: 47091 - protein, 84 aa, unidentified; identical to SEQ ID NO: 15895
  REGION 1..84: note = Description of Unknown:ENSG00000168769 known_pos_ctrl sequence

SEQ ID NO: 47092 - protein, 85 aa, unidentified; identical to SEQ ID NO: 15896
  REGION 1..85: note = Description of Unknown:ENSG00000168769 known_pos_ctrl sequence

SEQ ID NO: 47093 - protein, 85 aa, unidentified; identical to SEQ ID NO: 15897
  REGION 1..85: note = Description of Unknown:ENSG00000168769 known_pos_ctrl sequence

SEQ ID NO: 47094 - protein, 85 aa, unidentified; identical to SEQ ID NO: 15898
  REGION 1..85: note = Description of Unknown:ENSG00000168769 known_pos_ctrl sequence

SEQ ID NO: 47095 - protein, 85 aa, unidentified; identical to SEQ ID NO: 15899
  REGION 1..85: note = Description of Unknown:ENSG00000168769 known_pos_ctrl sequence

SEQ ID NO: 47096 - protein, 85 aa, unidentified; identical to SEQ ID NO: 15900
  REGION 1..85: note = Description of Unknown:ENSG00000168769 known_pos_ctrl sequence

SEQ ID NO: 47097 - protein, 85 aa, unidentified; identical to SEQ ID NO: 15901
  REGION 1..85: note = Description of Unknown:ENSG00000168769 known_pos_ctrl sequence

SEQ ID NO: 47098 - protein, 85 aa, unidentified; identical to SEQ ID NO: 15902
  REGION 1..85: note = Description of Unknown:ENSG00000168769 known_pos_ctrl sequence

SEQ ID NO: 47099 - protein, 85 aa, unidentified
  REGION 1..85: note = Description of Unknown:ENSG00000168769 known_pos_ctrl sequence
LSNPNMDYKNGEHHSPSHIIHNYSAAPGMFNSSLHALHLQNKENDMLSHTANGLSKMLPALNHDRTACVQGGLHKLSDANGQEKQ

SEQ ID NO: 47100 - protein, 85 aa, unidentified; identical to SEQ ID NO: 15904
  REGION 1..85: note = Description of Unknown:ENSG00000168769 known_pos_ctrl sequence

SEQ ID NO: 47101 - protein, 85 aa, unidentified
  REGION 1..85: note = Description of Unknown:ENSG00000168769 known_pos_ctrl sequence
LALWEAKMAEKAREKEEECEKYGPDYVPQKSHGKKVKREPAEPHETSEPTYLRFIKSLAERTMSVTTDSTVTTSPYAFTRVTGPY

SEQ ID NO: 47102 - protein, 85 aa, unidentified; identical to SEQ ID NO: 15906
  REGION 1..85: note = Description of Unknown:ENSG00000106462 known_pos_ctrl sequence

SEQ ID NO: 47103 - protein, 85 aa, unidentified; identical to SEQ ID NO: 15907
  REGION 1..85: note = Description of Unknown:ENSG00000106462 known_pos_ctrl sequence

SEQ ID NO: 47104 - protein, 85 aa, unidentified; identical to SEQ ID NO: 15908
  REGION 1..85: note = Description of Unknown:ENSG00000106462 known_pos_ctrl sequence

SEQ ID NO: 47105 - protein, 85 aa, unidentified; identical to SEQ ID NO: 15909
  REGION 1..85: note = Description of Unknown:ENSG00000106462 known_pos_ctrl sequence

SEQ ID NO: 47106 - protein, 85 aa, unidentified; identical to SEQ ID NO: 15910
  REGION 1..85: note = Description of Unknown:ENSG00000106462 known_pos_ctrl sequence

SEQ ID NO: 47107 - protein, 85 aa, unidentified; identical to SEQ ID NO: 15911
  REGION 1..85: note = Description of Unknown:ENSG00000106462 known_pos_ctrl sequence

SEQ ID NO: 47108 - protein, 85 aa, unidentified; identical to SEQ ID NO: 15912
  REGION 1..85: note = Description of Unknown:ENSG00000106462 known_pos_ctrl sequence

SEQ ID NO: 47109 - protein, 85 aa, unidentified; identical to SEQ ID NO: 15913
  REGION 1..85: note = Description of Unknown:ENSG00000106462 known_pos_ctrl sequence

SEQ ID NO: 47110 - protein, 85 aa, unidentified; identical to SEQ ID NO: 15914
  REGION 1..85: note = Description of Unknown:ENSG00000106462 known_pos_ctrl sequence

SEQ ID NO: 47111 - protein, 85 aa, unidentified; identical to SEQ ID NO: 15915
  REGION 1..85: note = Description of Unknown:ENSG00000106462 known_pos_ctrl sequence

SEQ ID NO: 47112 - protein, 85 aa, unidentified; identical to SEQ ID NO: 15916
  REGION 1..85: note = Description of Unknown:ENSG00000106462 known_pos_ctrl sequence

SEQ ID NO: 47113 - protein, 85 aa, unidentified; identical to SEQ ID NO: 15917
  REGION 1..85: note = Description of Unknown:ENSG00000106462 known_pos_ctrl sequence

SEQ ID NO: 47114 - protein, 85 aa, unidentified; identical to SEQ ID NO: 15918
  REGION 1..85: note = Description of Unknown:ENSG00000106462 known_pos_ctrl sequence

SEQ ID NO: 47115 - protein, 85 aa, unidentified; identical to SEQ ID NO: 15919
  REGION 1..85: note = Description of Unknown:ENSG00000106462 known_pos_ctrl sequence

SEQ ID NO: 47116 - protein, 85 aa, unidentified; identical to SEQ ID NO: 15920
  REGION 1..85: note = Description of Unknown:ENSG00000106462 known_pos_ctrl sequence

SEQ ID NO: 47117 - protein, 84 aa, unidentified; identical to SEQ ID NO: 15921
  REGION 1..84: note = Description of Unknown:ENSG00000119772 known_pos_ctrl sequence

SEQ ID NO: 47118 - protein, 85 aa, unidentified; identical to SEQ ID NO: 15922
  REGION 1..85: note = Description of Unknown:ENSG00000088305 known_pos_ctrl sequence

SEQ ID NO: 47119 - protein, 85 aa, unidentified; identical to SEQ ID NO: 15923
  REGION 1..85: note = Description of Unknown:ENSG00000088305 known_pos_ctrl sequence

SEQ ID NO: 47120 - protein, 85 aa, unidentified; identical to SEQ ID NO: 15924
  REGION 1..85: note = Description of Unknown:ENSG00000088305 known_pos_ctrl sequence

SEQ ID NO: 47121 - protein, 85 aa, unidentified; identical to SEQ ID NO: 15925
  REGION 1..85: note = Description of Unknown:ENSG00000088305 known_pos_ctrl sequence

SEQ ID NO: 47122 - protein, 85 aa, unidentified; identical to SEQ ID NO: 15926
  REGION 1..85: note = Description of Unknown:ENSG00000088305 known_pos_ctrl sequence

SEQ ID NO: 47123 - protein, 85 aa, unidentified; identical to SEQ ID NO: 15927
  REGION 1..85: note = Description of Unknown:ENSG00000088305 known_pos_ctrl sequence

SEQ ID NO: 47124 - protein, 85 aa, unidentified; identical to SEQ ID NO: 15928
  REGION 1..85: note = Description of Unknown:ENSG00000088305 known_pos_ctrl sequence

SEQ ID NO: 47125 - protein, 85 aa, unidentified; identical to SEQ ID NO: 15929
  REGION 1..85: note = Description of Unknown:ENSG00000088305 known_pos_ctrl sequence

SEQ ID NO: 47126 - protein, 85 aa, unidentified; identical to SEQ ID NO: 15930
  REGION 1..85: note = Description of Unknown:ENSG00000088305 known_pos_ctrl sequence

SEQ ID NO: 47127 - protein, 85 aa, unidentified; identical to SEQ ID NO: 15931
  REGION 1..85: note = Description of Unknown:ENSG00000106462 known_pos_ctrl sequence

SEQ ID NO: 47128 - protein, 85 aa, unidentified; identical to SEQ ID NO: 15932
  REGION 1..85: note = Description of Unknown:ENSG00000106462 known_pos_ctrl sequence

SEQ ID NO: 47129 - protein, 85 aa, unidentified; identical to SEQ ID NO: 15933
  REGION 1..85: note = Description of Unknown:ENSG00000106462 known_pos_ctrl sequence

SEQ ID NO: 47130 - protein, 85 aa, unidentified; identical to SEQ ID NO: 15934
  REGION 1..85: note = Description of Unknown:ENSG00000106462 known_pos_ctrl sequence

SEQ ID NO: 47131 - protein, 85 aa, unidentified; identical to SEQ ID NO: 15935
  REGION 1..85: note = Description of Unknown:ENSG00000106462 known_pos_ctrl sequence

SEQ ID NO: 47132 - protein, 85 aa, unidentified; identical to SEQ ID NO: 15936
  REGION 1..85: note = Description of Unknown:ENSG00000106462 known_pos_ctrl sequence

SEQ ID NO: 47133 - protein, 85 aa, unidentified; identical to SEQ ID NO: 15937
  REGION 1..85: note = Description of Unknown:ENSG00000106462 known_pos_ctrl sequence

SEQ ID NO: 47134 - protein, 85 aa, unidentified; identical to SEQ ID NO: 15938
  REGION 1..85: note = Description of Unknown:ENSG00000106462 known_pos_ctrl sequence

SEQ ID NO: 47135 - protein, 85 aa, unidentified; identical to SEQ ID NO: 15939
  REGION 1..85: note = Description of Unknown:ENSG00000106462 known_pos_ctrl sequence

SEQ ID NO: 47136 - protein, 85 aa, unidentified; identical to SEQ ID NO: 15940
  REGION 1..85: note = Description of Unknown:ENSG00000106462 known_pos_ctrl sequence

SEQ ID NO: 47137 - protein, 85 aa, unidentified; identical to SEQ ID NO: 15941
  REGION 1..85: note = Description of Unknown:ENSG00000106462 known_pos_ctrl sequence

SEQ ID NO: 47138 - protein, 85 aa, unidentified; identical to SEQ ID NO: 15942
  REGION 1..85: note = Description of Unknown:ENSG00000169057 known_pos_ctrl sequence

SEQ ID NO: 47139 - protein, 85 aa, unidentified; identical to SEQ ID NO: 15943
  REGION 1..85: note = Description of Unknown:ENSG00000169057 known_pos_ctrl sequence

SEQ ID NO: 47140 - protein, 84 aa, unidentified; identical to SEQ ID NO: 15944
  REGION 1..84: note = Description of Unknown:ENSG00000169057 known_pos_ctrl sequence

SEQ ID NO: 47141 - protein, 85 aa, unidentified; identical to SEQ ID NO: 15945
  REGION 1..85: note = Description of Unknown:ENSG00000169057 known_pos_ctrl sequence

SEQ ID NO: 47142 - protein, 85 aa, unidentified; identical to SEQ ID NO: 15946
  REGION 1..85: note = Description of Unknown:ENSG00000119772 known_pos_ctrl sequence

SEQ ID NO: 47143 - protein, 85 aa, unidentified; identical to SEQ ID NO: 15947
  REGION 1..85: note = Description of Unknown:ENSG00000119772 known_pos_ctrl sequence

SEQ ID NO: 47144 - protein, 85 aa, unidentified; identical to SEQ ID NO: 15948
  REGION 1..85: note = Description of Unknown:ENSG00000119772 known_pos_ctrl sequence

SEQ ID NO: 47145 - protein, 85 aa, unidentified; identical to SEQ ID NO: 15949
  REGION 1..85: note = Description of Unknown:ENSG00000119772 known_pos_ctrl sequence

SEQ ID NO: 47146 - protein, 85 aa, unidentified; identical to SEQ ID NO: 15950
  REGION 1..85: note = Description of Unknown:ENSG00000119772 known_pos_ctrl sequence

SEQ ID NO: 47147 - protein, 85 aa, unidentified; identical to SEQ ID NO: 15951
  REGION 1..85: note = Description of Unknown:ENSG00000119772 known_pos_ctrl sequence

SEQ ID NO: 47148 - protein, 85 aa, unidentified; identical to SEQ ID NO: 15952
  REGION 1..85: note = Description of Unknown:ENSG00000119772 known_pos_ctrl sequence

SEQ ID NO: 47149 - protein, 85 aa, unidentified; identical to SEQ ID NO: 15953
  REGION 1..85: note = Description of Unknown:ENSG00000119772 known_pos_ctrl sequence

SEQ ID NO: 47150 - protein, 85 aa, unidentified; identical to SEQ ID NO: 15954
  REGION 1..85: note = Description of Unknown:ENSG00000119772 known_pos_ctrl sequence

SEQ ID NO: 47151 - protein, 85 aa, unidentified; identical to SEQ ID NO: 15955
  REGION 1..85: note = Description of Unknown:ENSG00000119772 known_pos_ctrl sequence

SEQ ID NO: 47152 - protein, 85 aa, unidentified; identical to SEQ ID NO: 15956
  REGION 1..85: note = Description of Unknown:ENSG00000119772 known_pos_ctrl sequence

SEQ ID NO: 47153 - protein, 85 aa, unidentified; identical to SEQ ID NO: 15957
  REGION 1..85: note = Description of Unknown:ENSG00000119772 known_pos_ctrl sequence

SEQ ID NO: 47154 - protein, 85 aa, unidentified; identical to SEQ ID NO: 15958
  REGION 1..85: note = Description of Unknown:ENSG00000119772 known_pos_ctrl sequence

SEQ ID NO: 47155 - protein, 85 aa, unidentified; identical to SEQ ID NO: 15959
  REGION 1..85: note = Description of Unknown:ENSG00000119772 known_pos_ctrl sequence

SEQ ID NO: 47156 - protein, 85 aa, unidentified; identical to SEQ ID NO: 15960
  REGION 1..85: note = Description of Unknown:ENSG00000119772 known_pos_ctrl sequence

SEQ ID NO: 47157 - protein, 85 aa, unidentified; identical to SEQ ID NO: 15961
  REGION 1..85: note = Description of Unknown:ENSG00000119772 known_pos_ctrl sequence

SEQ ID NO: 47158 - protein, 85 aa, unidentified; identical to SEQ ID NO: 15962
  REGION 1..85: note = Description of Unknown:ENSG00000004487 known_pos_ctrl sequence

SEQ ID NO: 47159 - protein, 85 aa, unidentified; identical to SEQ ID NO: 15963
  REGION 1..85: note = Description of Unknown:ENSG00000004487 known_pos_ctrl sequence

SEQ ID NO: 47160 - protein, 85 aa, unidentified; identical to SEQ ID NO: 15964
  REGION 1..85: note = Description of Unknown:ENSG00000004487 known_pos_ctrl sequence

SEQ ID NO: 47161 - protein, 85 aa, unidentified; identical to SEQ ID NO: 15965
  REGION 1..85: note = Description of Unknown:ENSG00000004487 known_pos_ctrl sequence

SEQ ID NO: 47162 - protein, 85 aa, unidentified; identical to SEQ ID NO: 15966
  REGION 1..85: note = Description of Unknown:ENSG00000004487 known_pos_ctrl sequence

SEQ ID NO: 47163 - protein, 85 aa, unidentified; identical to SEQ ID NO: 15967
  REGION 1..85: note = Description of Unknown:ENSG00000004487 known_pos_ctrl sequence

SEQ ID NO: 47164 - protein, 85 aa, unidentified; identical to SEQ ID NO: 15968
  REGION 1..85: note = Description of Unknown:ENSG00000004487 known_pos_ctrl sequence

SEQ ID NO: 47165 - protein, 85 aa, unidentified; identical to SEQ ID NO: 15969
  REGION 1..85: note = Description of Unknown:ENSG00000004487 known_pos_ctrl sequence

SEQ ID NO: 47166 - protein, 85 aa, unidentified; identical to SEQ ID NO: 15970
  REGION 1..85: note = Description of Unknown:ENSG00000187605 known_pos_ctrl sequence

SEQ ID NO: 47167 - protein, 85 aa, unidentified; identical to SEQ ID NO: 15971
  REGION 1..85: note = Description of Unknown:ENSG00000187605 known_pos_ctrl sequence

SEQ ID NO: 47168 - protein, 85 aa, unidentified; identical to SEQ ID NO: 15972
  REGION 1..85: note = Description of Unknown:ENSG00000187605 known_pos_ctrl sequence

SEQ ID NO: 47169 - protein, 85 aa, unidentified; identical to SEQ ID NO: 15973
  REGION 1..85: note = Description of Unknown:ENSG00000187605 known_pos_ctrl sequence

SEQ ID NO: 47170 - protein, 85 aa, unidentified; identical to SEQ ID NO: 15974
  REGION 1..85: note = Description of Unknown:ENSG00000187605 known_pos_ctrl sequence

SEQ ID NO: 47171 - protein, 85 aa, unidentified; identical to SEQ ID NO: 15975
  REGION 1..85: note = Description of Unknown:ENSG00000187605 known_pos_ctrl sequence

SEQ ID NO: 47172 - protein, 85 aa, unidentified; identical to SEQ ID NO: 15976
  REGION 1..85: note = Description of Unknown:ENSG00000187605 known_pos_ctrl sequence

SEQ ID NO: 47173 - protein, 85 aa, unidentified; identical to SEQ ID NO: 15977
  REGION 1..85: note = Description of Unknown:ENSG00000187605 known_pos_ctrl sequence

SEQ ID NO: 47174 - protein, 85 aa, unidentified; identical to SEQ ID NO: 15978
  REGION 1..85: note = Description of Unknown:ENSG00000187605 known_pos_ctrl sequence

SEQ ID NO: 47175 - protein, 85 aa, unidentified; identical to SEQ ID NO: 15979
  REGION 1..85: note = Description of Unknown:ENSG00000187605 known_pos_ctrl sequence

SEQ ID NO: 47176 - protein, 85 aa, unidentified; identical to SEQ ID NO: 15980
  REGION 1..85: note = Description of Unknown:ENSG00000187605 known_pos_ctrl sequence

SEQ ID NO: 47177 - protein, 85 aa, unidentified; identical to SEQ ID NO: 15981
  REGION 1..85: note = Description of Unknown:ENSG00000187605 known_pos_ctrl sequence

SEQ ID NO: 47178 - protein, 85 aa, unidentified; identical to SEQ ID NO: 15982
  REGION 1..85: note = Description of Unknown:ENSG00000187605 known_pos_ctrl sequence

SEQ ID NO: 47179 - protein, 85 aa, unidentified; identical to SEQ ID NO: 15983
  REGION 1..85: note = Description of Unknown:ENSG00000187605 known_pos_ctrl sequence

SEQ ID NO: 47180 - protein, 85 aa, unidentified
  REGION 1..85: note = Description of Unknown:ENSG00000187605 known_pos_ctrl sequence
LELAGITSDPGLSLKGGLSQQGLKPSLKVEPQNHFSSFKYSGNAVVESYSVLGNCRPSDPYSMNSVYSYHSYYAQPSLTSVNGFH

SEQ ID NO: 47181 - protein, 85 aa, unidentified; identical to SEQ ID NO: 15985
  REGION 1..85: note = Description of Unknown:ENSG00000187605 known_pos_ctrl sequence

SEQ ID NO: 47182 - protein, 85 aa, unidentified; identical to SEQ ID NO: 15986
  REGION 1..85: note = Description of Unknown:ENSG00000187605 known_pos_ctrl sequence

SEQ ID NO: 47183 - protein, 85 aa, unidentified; identical to SEQ ID NO: 15987
  REGION 1..85: note = Description of Unknown:ENSG00000187605 known_pos_ctrl sequence

SEQ ID NO: 47184 - protein, 85 aa, unidentified; identical to SEQ ID NO: 15988
  REGION 1..85: note = Description of Unknown:ENSG00000187605 known_pos_ctrl sequence

SEQ ID NO: 47185 - protein, 85 aa, unidentified; identical to SEQ ID NO: 15989
  REGION 1..85: note = Description of Unknown:ENSG00000187605 known_pos_ctrl sequence

SEQ ID NO: 47186 - protein, 85 aa, unidentified; identical to SEQ ID NO: 15990
  REGION 1..85: note = Description of Unknown:ENSG00000187605 known_pos_ctrl sequence

SEQ ID NO: 47187 - protein, 85 aa, unidentified; identical to SEQ ID NO: 15991
  REGION 1..85: note = Description of Unknown:ENSG00000187605 known_pos_ctrl sequence

SEQ ID NO: 47188 - protein, 85 aa, unidentified; identical to SEQ ID NO: 15992
  REGION 1..85: note = Description of Unknown:ENSG00000187605 known_pos_ctrl sequence

SEQ ID NO: 47189 - protein, 85 aa, unidentified; identical to SEQ ID NO: 15993
  REGION 1..85: note = Description of Unknown:ENSG00000187605 known_pos_ctrl sequence

SEQ ID NO: 47190 - protein, 85 aa, unidentified; identical to SEQ ID NO: 15994
  REGION 1..85: note = Description of Unknown:ENSG00000187605 known_pos_ctrl sequence

SEQ ID NO: 47191 - protein, 85 aa, unidentified; identical to SEQ ID NO: 15995
  REGION 1..85: note = Description of Unknown:ENSG00000187605 known_pos_ctrl sequence

SEQ ID NO: 47192 - protein, 85 aa, unidentified; identical to SEQ ID NO: 15996
  REGION 1..85: note = Description of Unknown:ENSG00000187605 known_pos_ctrl sequence

SEQ ID NO: 47193 - protein, 85 aa, unidentified; identical to SEQ ID NO: 15997
  REGION 1..85: note = Description of Unknown:ENSG00000187605 known_pos_ctrl sequence

SEQ ID NO: 47194 - protein, 85 aa, unidentified; identical to SEQ ID NO: 15998
  REGION 1..85: note = Description of Unknown:ENSG00000187605 known_pos_ctrl sequence

SEQ ID NO: 47195 - protein, 85 aa, unidentified; identical to SEQ ID NO: 15999
  REGION 1..85: note = Description of Unknown:ENSG00000187605 known_pos_ctrl sequence

SEQ ID NO: 47196 - protein, 85 aa, unidentified; identical to SEQ ID NO: 16000
  REGION 1..85: note = Description of Unknown:ENSG00000187605 known_pos_ctrl sequence

SEQ ID NO: 47197 - protein, 85 aa, unidentified; identical to SEQ ID NO: 16001
  REGION 1..85: note = Description of Unknown:ENSG00000187605 known_pos_ctrl sequence

SEQ ID NO: 47198 - protein, 85 aa, unidentified; identical to SEQ ID NO: 16002
  REGION 1..85: note = Description of Unknown:ENSG00000187605 known_pos_ctrl sequence

SEQ ID NO: 47199 - protein, 85 aa, unidentified; identical to SEQ ID NO: 16003
  REGION 1..85: note = Description of Unknown:ENSG00000187605 known_pos_ctrl sequence

SEQ ID NO: 47200 - protein, 85 aa, unidentified; identical to SEQ ID NO: 16004
  REGION 1..85: note = Description of Unknown:ENSG00000187605 known_pos_ctrl sequence

SEQ ID NO: 47201 - protein, 85 aa, unidentified; identical to SEQ ID NO: 16005
  REGION 1..85: note = Description of Unknown:ENSG00000187605 known_pos_ctrl sequence

SEQ ID NO: 47202 - protein, 85 aa, unidentified; identical to SEQ ID NO: 16006
  REGION 1..85: note = Description of Unknown:ENSG00000187605 known_pos_ctrl sequence

SEQ ID NO: 47203 - protein, 85 aa, unidentified
  REGION 1..85: note = Description of Unknown:ENSG00000187605 known_pos_ctrl sequence
LTQAEPVPRDAGKMGKTPLSEVSQNGGPSHLWGQYSGGPSMSPKRTNGVGGSWGVFSSGESPAIVPDKLSSFGASCLAPSHFTDG

SEQ ID NO: 47204 - protein, 85 aa, unidentified; identical to SEQ ID NO: 16008
  REGION 1..85: note = Description of Unknown:ENSG00000187605 known_pos_ctrl sequence

SEQ ID NO: 47205 - protein, 85 aa, unidentified; identical to SEQ ID NO: 16009
  REGION 1..85: note = Description of Unknown:ENSG00000187605 known_pos_ctrl sequence

SEQ ID NO: 47206 - protein, 85 aa, unidentified; identical to SEQ ID NO: 16010
  REGION 1..85: note = Description of Unknown:ENSG00000187605 known_pos_ctrl sequence

SEQ ID NO: 47207 - protein, 84 aa, unidentified; identical to SEQ ID NO: 16011
  REGION 1..84: note = Description of Unknown:ENSG00000119772 known_pos_ctrl sequence

SEQ ID NO: 47208 - protein, 85 aa, unidentified; identical to SEQ ID NO: 16012
  REGION 1..85: note = Description of Unknown:ENSG00000185122 known_pos_ctrl sequence

SEQ ID NO: 47209 - protein, 85 aa, unidentified; identical to SEQ ID NO: 16013
  REGION 1..85: note = Description of Unknown:ENSG00000185122 known_pos_ctrl sequence

SEQ ID NO: 47210 - protein, 85 aa, unidentified; identical to SEQ ID NO: 16014
  REGION 1..85: note = Description of Unknown:ENSG00000185122 known_pos_ctrl sequence

SEQ ID NO: 47211 - protein, 85 aa, unidentified; identical to SEQ ID NO: 16015
  REGION 1..85: note = Description of Unknown:ENSG00000185122 known_pos_ctrl sequence

SEQ ID NO: 47212 - protein, 85 aa, unidentified; identical to SEQ ID NO: 16016
  REGION 1..85: note = Description of Unknown:ENSG00000185122 known_pos_ctrl sequence

SEQ ID NO: 47213 - protein, 84 aa, unidentified; identical to SEQ ID NO: 16017
  REGION 1..84: note = Description of Unknown:ENSG00000185122 known_pos_ctrl sequence

SEQ ID NO: 47214 - protein, 85 aa, unidentified; identical to SEQ ID NO: 16018
  REGION 1..85: note = Description of Unknown:ENSG00000185122 known_pos_ctrl sequence

SEQ ID NO: 47215 - protein, 85 aa, unidentified; identical to SEQ ID NO: 16019
  REGION 1..85: note = Description of Unknown:ENSG00000185122 known_pos_ctrl sequence

SEQ ID NO: 47216 - protein, 85 aa, unidentified; identical to SEQ ID NO: 16020
  REGION 1..85: note = Description of Unknown:ENSG00000185122 known_pos_ctrl sequence

SEQ ID NO: 47217 - protein, 85 aa, unidentified; identical to SEQ ID NO: 16021
  REGION 1..85: note = Description of Unknown:ENSG00000185122 known_pos_ctrl sequence

SEQ ID NO: 47218 - protein, 85 aa, unidentified; identical to SEQ ID NO: 16022
  REGION 1..85: note = Description of Unknown:ENSG00000185122 known_pos_ctrl sequence

SEQ ID NO: 47219 - protein, 85 aa, unidentified; identical to SEQ ID NO: 16023
  REGION 1..85: note = Description of Unknown:ENSG00000004487 known_pos_ctrl sequence

SEQ ID NO: 47220 - protein, 85 aa, unidentified; identical to SEQ ID NO: 16024
  REGION 1..85: note = Description of Unknown:ENSG00000004487 known_pos_ctrl sequence

SEQ ID NO: 47221 - protein, 85 aa, unidentified; identical to SEQ ID NO: 16025
  REGION 1..85: note = Description of Unknown:ENSG00000004487 known_pos_ctrl sequence

SEQ ID NO: 47222 - protein, 85 aa, unidentified; identical to SEQ ID NO: 16026
  REGION 1..85: note = Description of Unknown:ENSG00000004487 known_pos_ctrl sequence

SEQ ID NO: 47223 - protein, 85 aa, unidentified; identical to SEQ ID NO: 16027
  REGION 1..85: note = Description of Unknown:ENSG00000004487 known_pos_ctrl sequence

SEQ ID NO: 47224 - protein, 85 aa, unidentified; identical to SEQ ID NO: 16028
  REGION 1..85: note = Description of Unknown:ENSG00000004487 known_pos_ctrl sequence

SEQ ID NO: 47225 - protein, 85 aa, unidentified; identical to SEQ ID NO: 16029
  REGION 1..85: note = Description of Unknown:ENSG00000004487 known_pos_ctrl sequence

SEQ ID NO: 47226 - protein, 85 aa, unidentified; identical to SEQ ID NO: 16030
  REGION 1..85: note = Description of Unknown:ENSG00000004487 known_pos_ctrl sequence

SEQ ID NO: 47227 - protein, 85 aa, unidentified; identical to SEQ ID NO: 16031
  REGION 1..85: note = Description of Unknown:ENSG00000004487 known_pos_ctrl sequence

SEQ ID NO: 47228 - protein, 85 aa, unidentified; identical to SEQ ID NO: 16032
  REGION 1..85: note = Description of Unknown:ENSG00000004487 known_pos_ctrl sequence

SEQ ID NO: 47229 - protein, 85 aa, unidentified; identical to SEQ ID NO: 16033
  REGION 1..85: note = Description of Unknown:ENSG00000004487 known_pos_ctrl sequence

SEQ ID NO: 47230 - protein, 85 aa, unidentified; identical to SEQ ID NO: 16034
  REGION 1..85: note = Description of Unknown:ENSG00000004487 known_pos_ctrl sequence

SEQ ID NO: 47231 - protein, 85 aa, unidentified; identical to SEQ ID NO: 16035
  REGION 1..85: note = Description of Unknown:ENSG00000004487 known_pos_ctrl sequence

SEQ ID NO: 47232 - protein, 85 aa, unidentified; identical to SEQ ID NO: 16036
  REGION 1..85: note = Description of Unknown:ENSG00000004487 known_pos_ctrl sequence

SEQ ID NO: 47233 - protein, 85 aa, unidentified; identical to SEQ ID NO: 16037
  REGION 1..85: note = Description of Unknown:ENSG00000004487 known_pos_ctrl sequence

SEQ ID NO: 47234 - protein, 85 aa, unidentified; identical to SEQ ID NO: 16038
  REGION 1..85: note = Description of Unknown:ENSG00000004487 known_pos_ctrl sequence

SEQ ID NO: 47235 - protein, 85 aa, unidentified; identical to SEQ ID NO: 16039
  REGION 1..85: note = Description of Unknown:ENSG00000169057 known_pos_ctrl sequence

SEQ ID NO: 47236 - protein, 85 aa, unidentified; identical to SEQ ID NO: 16040
  REGION 1..85: note = Description of Unknown:ENSG00000169057 known_pos_ctrl sequence

SEQ ID NO: 47237 - protein, 85 aa, unidentified; identical to SEQ ID NO: 16041
  REGION 1..85: note = Description of Unknown:ENSG00000169057 known_pos_ctrl sequence

SEQ ID NO: 47238 - protein, 85 aa, unidentified; identical to SEQ ID NO: 16042
  REGION 1..85: note = Description of Unknown:ENSG00000169057 known_pos_ctrl sequence

SEQ ID NO: 47239 - protein, 85 aa, unidentified; identical to SEQ ID NO: 16043
  REGION 1..85: note = Description of Unknown:ENSG00000169057 known_pos_ctrl sequence

SEQ ID NO: 47240 - protein, 85 aa, unidentified; identical to SEQ ID NO: 16044
  REGION 1..85: note = Description of Unknown:ENSG00000169057 known_pos_ctrl sequence

SEQ ID NO: 47241 - protein, 85 aa, unidentified; identical to SEQ ID NO: 16045
  REGION 1..85: note = Description of Unknown:ENSG00000169057 known_pos_ctrl sequence

SEQ ID NO: 47242 - protein, 85 aa, unidentified; identical to SEQ ID NO: 16046
  REGION 1..85: note = Description of Unknown:ENSG00000169057 known_pos_ctrl sequence

SEQ ID NO: 47243 - protein, 85 aa, unidentified; identical to SEQ ID NO: 16047
  REGION 1..85: note = Description of Unknown:ENSG00000169057 known_pos_ctrl sequence

SEQ ID NO: 47244 - protein, 85 aa, unidentified; identical to SEQ ID NO: 16048
  REGION 1..85: note = Description of Unknown:ENSG00000100393 known_pos_ctrl sequence

SEQ ID NO: 47245 - protein, 85 aa, unidentified; identical to SEQ ID NO: 16049
  REGION 1..85: note = Description of Unknown:ENSG00000100393 known_pos_ctrl sequence

SEQ ID NO: 47246 - protein, 85 aa, unidentified; identical to SEQ ID NO: 16050
  REGION 1..85: note = Description of Unknown:ENSG00000100393 known_pos_ctrl sequence

SEQ ID NO: 47247 - protein, 85 aa, unidentified; identical to SEQ ID NO: 16051
  REGION 1..85: note = Description of Unknown:ENSG00000100393 known_pos_ctrl sequence

SEQ ID NO: 47248 - protein, 85 aa, unidentified; identical to SEQ ID NO: 16052
  REGION 1..85: note = Description of Unknown:ENSG00000100393 known_pos_ctrl sequence

SEQ ID NO: 47249 - protein, 85 aa, unidentified; identical to SEQ ID NO: 16053
  REGION 1..85: note = Description of Unknown:ENSG00000100393 known_pos_ctrl sequence

SEQ ID NO: 47250 - protein, 85 aa, unidentified; identical to SEQ ID NO: 16054
  REGION 1..85: note = Description of Unknown:ENSG00000100393 known_pos_ctrl sequence

SEQ ID NO: 47251 - protein, 85 aa, unidentified; identical to SEQ ID NO: 16055
  REGION 1..85: note = Description of Unknown:ENSG00000100393 known_pos_ctrl sequence

SEQ ID NO: 47252 - protein, 85 aa, unidentified; identical to SEQ ID NO: 16056
  REGION 1..85: note = Description of Unknown:ENSG00000100393 known_pos_ctrl sequence

SEQ ID NO: 47253 - protein, 85 aa, unidentified; identical to SEQ ID NO: 16057
  REGION 1..85: note = Description of Unknown:ENSG00000100393 known_pos_ctrl sequence

SEQ ID NO: 47254 - protein, 85 aa, unidentified; identical to SEQ ID NO: 16058
  REGION 1..85: note = Description of Unknown:ENSG00000100393 known_pos_ctrl sequence

SEQ ID NO: 47255 - protein, 85 aa, unidentified; identical to SEQ ID NO: 16059
  REGION 1..85: note = Description of Unknown:ENSG00000100393 known_pos_ctrl sequence

SEQ ID NO: 47256 - protein, 85 aa, unidentified; identical to SEQ ID NO: 16060
  REGION 1..85: note = Description of Unknown:ENSG00000100393 known_pos_ctrl sequence

SEQ ID NO: 47257 - protein, 85 aa, unidentified; identical to SEQ ID NO: 16061
  REGION 1..85: note = Description of Unknown:ENSG00000100393 known_pos_ctrl sequence

SEQ ID NO: 47258 - protein, 85 aa, unidentified; identical to SEQ ID NO: 16062
  REGION 1..85: note = Description of Unknown:ENSG00000100393 known_pos_ctrl sequence

SEQ ID NO: 47259 - protein, 85 aa, unidentified; identical to SEQ ID NO: 16063
  REGION 1..85: note = Description of Unknown:ENSG00000100393 known_pos_ctrl sequence

SEQ ID NO: 47260 - protein, 85 aa, unidentified; identical to SEQ ID NO: 16064
  REGION 1..85: note = Description of Unknown:ENSG00000100393 known_pos_ctrl sequence

SEQ ID NO: 47261 - protein, 85 aa, unidentified; identical to SEQ ID NO: 16065
  REGION 1..85: note = Description of Unknown:ENSG00000100393 known_pos_ctrl sequence

SEQ ID NO: 47262 - protein, 85 aa, unidentified; identical to SEQ ID NO: 16066
  REGION 1..85: note = Description of Unknown:ENSG00000100393 known_pos_ctrl sequence

SEQ ID NO: 47263 - protein, 85 aa, unidentified; identical to SEQ ID NO: 16067
  REGION 1..85: note = Description of Unknown:ENSG00000100393 known_pos_ctrl sequence

SEQ ID NO: 47264 - protein, 85 aa, unidentified; identical to SEQ ID NO: 16068
  REGION 1..85: note = Description of Unknown:ENSG00000100393 known_pos_ctrl sequence

SEQ ID NO: 47265 - protein, 85 aa, unidentified; identical to SEQ ID NO: 16069
  REGION 1..85: note = Description of Unknown:ENSG00000100393 known_pos_ctrl sequence

SEQ ID NO: 47266 - protein, 85 aa, unidentified; identical to SEQ ID NO: 16070
  REGION 1..85: note = Description of Unknown:ENSG00000100393 known_pos_ctrl sequence

SEQ ID NO: 47267 - protein, 85 aa, unidentified; identical to SEQ ID NO: 16071
  REGION 1..85: note = Description of Unknown:ENSG00000100393 known_pos_ctrl sequence

SEQ ID NO: 47268 - protein, 85 aa, unidentified; identical to SEQ ID NO: 16072
  REGION 1..85: note = Description of Unknown:ENSG00000100393 known_pos_ctrl sequence

SEQ ID NO: 47269 - protein, 85 aa, unidentified; identical to SEQ ID NO: 16073
  REGION 1..85: note = Description of Unknown:ENSG00000100393 known_pos_ctrl sequence

SEQ ID NO: 47270 - protein, 85 aa, unidentified
  REGION 1..85: note = Description of Unknown:ENSG00000100393 known_pos_ctrl sequence
LCCYGKQLCTIPRDATYYSYQNRYHFCEKCFNEIQGESVSLGDDPSQPQTTINKEQFSKRKNDTLDPELFVECTECGRKMHQICV

SEQ ID NO: 47271 - protein, 85 aa, unidentified; identical to SEQ ID NO: 16075
  REGION 1..85: note = Description of Unknown:ENSG00000100393 known_pos_ctrl sequence

SEQ ID NO: 47272 - protein, 85 aa, unidentified; identical to SEQ ID NO: 16076
  REGION 1..85: note = Description of Unknown:ENSG00000100393 known_pos_ctrl sequence

SEQ ID NO: 47273 - protein, 85 aa, unidentified; identical to SEQ ID NO: 16077
  REGION 1..85: note = Description of Unknown:ENSG00000100393 known_pos_ctrl sequence

SEQ ID NO: 47274 - protein, 85 aa, unidentified; identical to SEQ ID NO: 16078
  REGION 1..85: note = Description of Unknown:ENSG00000100393 known_pos_ctrl sequence

SEQ ID NO: 47275 - protein, 85 aa, unidentified; identical to SEQ ID NO: 16079
  REGION 1..85: note = Description of Unknown:ENSG00000100393 known_pos_ctrl sequence

SEQ ID NO: 47276 - protein, 85 aa, unidentified; identical to SEQ ID NO: 16080
  REGION 1..85: note = Description of Unknown:ENSG00000100393 known_pos_ctrl sequence

SEQ ID NO: 47277 - protein, 85 aa, unidentified; identical to SEQ ID NO: 16081
  REGION 1..85: note = Description of Unknown:ENSG00000100393 known_pos_ctrl sequence

SEQ ID NO: 47278 - protein, 85 aa, unidentified; identical to SEQ ID NO: 16082
  REGION 1..85: note = Description of Unknown:ENSG00000100393 known_pos_ctrl sequence

SEQ ID NO: 47279 - protein, 85 aa, unidentified; identical to SEQ ID NO: 16083
  REGION 1..85: note = Description of Unknown:ENSG00000100393 known_pos_ctrl sequence

SEQ ID NO: 47280 - protein, 85 aa, unidentified
  REGION 1..85: note = Description of Unknown:ENSG00000100393 known_pos_ctrl sequence
LNMAPQPGLGQVGISPLKPGTVSQQALQNLLRTLRSPSSPLQQQQVLSILHANPQLLAAFIKQRAAKYANSNPQPIPGQPGMPQG

SEQ ID NO: 47281 - protein, 85 aa, unidentified; identical to SEQ ID NO: 16085
  REGION 1..85: note = Description of Unknown:ENSG00000100393 known_pos_ctrl sequence

SEQ ID NO: 47282 - protein, 85 aa, unidentified; identical to SEQ ID NO: 16086
  REGION 1..85: note = Description of Unknown:ENSG00000100393 known_pos_ctrl sequence

SEQ ID NO: 47283 - protein, 85 aa, unidentified; identical to SEQ ID NO: 16087
  REGION 1..85: note = Description of Unknown:ENSG00000100393 known_pos_ctrl sequence

SEQ ID NO: 47284 - protein, 85 aa, unidentified; identical to SEQ ID NO: 16088
  REGION 1..85: note = Description of Unknown:ENSG00000106462 known_pos_ctrl sequence

SEQ ID NO: 47285 - protein, 84 aa, unidentified; identical to SEQ ID NO: 16089
  REGION 1..84: note = Description of Unknown:ENSG00000106462 known_pos_ctrl sequence

SEQ ID NO: 47286 - protein, 85 aa, unidentified; identical to SEQ ID NO: 16090
  REGION 1..85: note = Description of Unknown:ENSG00000106462 known_pos_ctrl sequence

SEQ ID NO: 47287 - protein, 85 aa, unidentified; identical to SEQ ID NO: 16091
  REGION 1..85: note = Description of Unknown:ENSG00000142182 known_pos_ctrl sequence

SEQ ID NO: 47288 - protein, 84 aa, unidentified; identical to SEQ ID NO: 16092
  REGION 1..84: note = Description of Unknown:ENSG00000142182 known_pos_ctrl sequence

SEQ ID NO: 47289 - protein, 85 aa, unidentified; identical to SEQ ID NO: 16093
  REGION 1..85: note = Description of Unknown:ENSG00000142182 known_pos_ctrl sequence

SEQ ID NO: 47290 - protein, 85 aa, unidentified; identical to SEQ ID NO: 16094
  REGION 1..85: note = Description of Unknown:ENSG00000100393 known_pos_ctrl sequence

SEQ ID NO: 47291 - protein, 85 aa, unidentified; identical to SEQ ID NO: 16095
  REGION 1..85: note = Description of Unknown:ENSG00000100393 known_pos_ctrl sequence

SEQ ID NO: 47292 - protein, 85 aa, unidentified; identical to SEQ ID NO: 16096
  REGION 1..85: note = Description of Unknown:ENSG00000100393 known_pos_ctrl sequence

SEQ ID NO: 47293 - protein, 85 aa, unidentified; identical to SEQ ID NO: 16097
  REGION 1..85: note = Description of Unknown:ENSG00000100393 known_pos_ctrl sequence

SEQ ID NO: 47294 - protein, 85 aa, unidentified; identical to SEQ ID NO: 16098
  REGION 1..85: note = Description of Unknown:ENSG00000168769 known_pos_ctrl sequence

SEQ ID NO: 47295 - protein, 85 aa, unidentified; identical to SEQ ID NO: 16099
  REGION 1..85: note = Description of Unknown:ENSG00000168769 known_pos_ctrl sequence

SEQ ID NO: 47296 - protein, 85 aa, unidentified; identical to SEQ ID NO: 16100
  REGION 1..85: note = Description of Unknown:ENSG00000168769 known_pos_ctrl sequence

SEQ ID NO: 47297 - protein, 85 aa, unidentified; identical to SEQ ID NO: 16101
  REGION 1..85: note = Description of Unknown:ENSG00000168769 known_pos_ctrl sequence

SEQ ID NO: 47298 - protein, 85 aa, unidentified; identical to SEQ ID NO: 16102
  REGION 1..85: note = Description of Unknown:ENSG00000168769 known_pos_ctrl sequence

SEQ ID NO: 47299 - protein, 85 aa, unidentified; identical to SEQ ID NO: 16103
  REGION 1..85: note = Description of Unknown:ENSG00000168769 known_pos_ctrl sequence

SEQ ID NO: 47300 - protein, 85 aa, unidentified; identical to SEQ ID NO: 16104
  REGION 1..85: note = Description of Unknown:ENSG00000168769 known_pos_ctrl sequence

SEQ ID NO: 47301 - protein, 85 aa, unidentified; identical to SEQ ID NO: 16105
  REGION 1..85: note = Description of Unknown:ENSG00000168769 known_pos_ctrl sequence

SEQ ID NO: 47302 - protein, 85 aa, unidentified; identical to SEQ ID NO: 16106
  REGION 1..85: note = Description of Unknown:ENSG00000168769 known_pos_ctrl sequence

SEQ ID NO: 47303 - protein, 85 aa, unidentified; identical to SEQ ID NO: 16107
  REGION 1..85: note = Description of Unknown:ENSG00000168769 known_pos_ctrl sequence

SEQ ID NO: 47304 - protein, 85 aa, unidentified; identical to SEQ ID NO: 16108
  REGION 1..85: note = Description of Unknown:ENSG00000168769 known_pos_ctrl sequence

SEQ ID NO: 47305 - protein, 85 aa, unidentified; identical to SEQ ID NO: 16109
  REGION 1..85: note = Description of Unknown:ENSG00000168769 known_pos_ctrl sequence

SEQ ID NO: 47306 - protein, 85 aa, unidentified; identical to SEQ ID NO: 16110
  REGION 1..85: note = Description of Unknown:ENSG00000168769 known_pos_ctrl sequence

SEQ ID NO: 47307 - protein, 85 aa, unidentified; identical to SEQ ID NO: 16111
  REGION 1..85: note = Description of Unknown:ENSG00000168769 known_pos_ctrl sequence

SEQ ID NO: 47308 - protein, 85 aa, unidentified; identical to SEQ ID NO: 16112
  REGION 1..85: note = Description of Unknown:ENSG00000168769 known_pos_ctrl sequence

SEQ ID NO: 47309 - protein, 85 aa, unidentified; identical to SEQ ID NO: 16113
  REGION 1..85: note = Description of Unknown:ENSG00000168769 known_pos_ctrl sequence

SEQ ID NO: 47310 - protein, 85 aa, unidentified; identical to SEQ ID NO: 16114
  REGION 1..85: note = Description of Unknown:ENSG00000168769 known_pos_ctrl sequence

SEQ ID NO: 47311 - protein, 85 aa, unidentified; identical to SEQ ID NO: 16115
  REGION 1..85: note = Description of Unknown:ENSG00000168769 known_pos_ctrl sequence

SEQ ID NO: 47312 - protein, 85 aa, unidentified; identical to SEQ ID NO: 16116
  REGION 1..85: note = Description of Unknown:ENSG00000168769 known_pos_ctrl sequence

SEQ ID NO: 47313 - protein, 85 aa, unidentified
  REGION 1..85: note = Description of Unknown:ENSG00000168769 known_pos_ctrl sequence
LAELLRLSGPVMQQSQQPQPLQKQPPQPQQQQRPQQQQPHHPQTESVNSYSASGSTNPYMRRPNPVSPYPNSSHTSDIYGSTSPM

SEQ ID NO: 47314 - protein, 85 aa, unidentified; identical to SEQ ID NO: 16118
  REGION 1..85: note = Description of Unknown:ENSG00000168769 known_pos_ctrl sequence

SEQ ID NO: 47315 - protein, 85 aa, unidentified; identical to SEQ ID NO: 16119
  REGION 1..85: note = Description of Unknown:ENSG00000168769 known_pos_ctrl sequence

SEQ ID NO: 47316 - protein, 85 aa, unidentified; identical to SEQ ID NO: 16120
  REGION 1..85: note = Description of Unknown:ENSG00000168769 known_pos_ctrl sequence

SEQ ID NO: 47317 - protein, 85 aa, unidentified; identical to SEQ ID NO: 16121
  REGION 1..85: note = Description of Unknown:ENSG00000168769 known_pos_ctrl sequence

SEQ ID NO: 47318 - protein, 85 aa, unidentified; identical to SEQ ID NO: 16122
  REGION 1..85: note = Description of Unknown:ENSG00000168769 known_pos_ctrl sequence

SEQ ID NO: 47319 - protein, 85 aa, unidentified; identical to SEQ ID NO: 16123
  REGION 1..85: note = Description of Unknown:ENSG00000168769 known_pos_ctrl sequence

SEQ ID NO: 47320 - protein, 85 aa, unidentified; identical to SEQ ID NO: 16124
  REGION 1..85: note = Description of Unknown:ENSG00000168769 known_pos_ctrl sequence

SEQ ID NO: 47321 - protein, 85 aa, unidentified; identical to SEQ ID NO: 16125
  REGION 1..85: note = Description of Unknown:ENSG00000168769 known_pos_ctrl sequence

SEQ ID NO: 47322 - protein, 85 aa, unidentified; identical to SEQ ID NO: 16126
  REGION 1..85: note = Description of Unknown:ENSG00000168769 known_pos_ctrl sequence

SEQ ID NO: 47323 - protein, 85 aa, unidentified; identical to SEQ ID NO: 16127
  REGION 1..85: note = Description of Unknown:ENSG00000168769 known_pos_ctrl sequence

SEQ ID NO: 47324 - protein, 85 aa, unidentified; identical to SEQ ID NO: 16128
  REGION 1..85: note = Description of Unknown:ENSG00000168769 known_pos_ctrl sequence

SEQ ID NO: 47325 - protein, 85 aa, unidentified; identical to SEQ ID NO: 16129
  REGION 1..85: note = Description of Unknown:ENSG00000168769 known_pos_ctrl sequence

SEQ ID NO: 47326 - protein, 85 aa, unidentified
  REGION 1..85: note = Description of Unknown:ENSG00000168769 known_pos_ctrl sequence
LNQQASETEPFSNSHLLQHKPHKQAAQTQPSQSSHLPQNQQQQQKLQIKNKEEILQTFPHPQSNNDQQREGSFFGQTKVEECFHG

SEQ ID NO: 47327 - protein, 85 aa, unidentified; identical to SEQ ID NO: 16131
  REGION 1..85: note = Description of Unknown:ENSG00000168769 known_pos_ctrl sequence

SEQ ID NO: 47328 - protein, 85 aa, unidentified; identical to SEQ ID NO: 16132
  REGION 1..85: note = Description of Unknown:ENSG00000168769 known_pos_ctrl sequence

SEQ ID NO: 47329 - protein, 85 aa, unidentified; identical to SEQ ID NO: 16133
  REGION 1..85: note = Description of Unknown:ENSG00000168769 known_pos_ctrl sequence

SEQ ID NO: 47330 - protein, 85 aa, unidentified; identical to SEQ ID NO: 16134
  REGION 1..85: note = Description of Unknown:ENSG00000168769 known_pos_ctrl sequence

SEQ ID NO: 47331 - protein, 85 aa, unidentified; identical to SEQ ID NO: 16135
  REGION 1..85: note = Description of Unknown:ENSG00000168769 known_pos_ctrl sequence

SEQ ID NO: 47332 - protein, 85 aa, unidentified; identical to SEQ ID NO: 16136
  REGION 1..85: note = Description of Unknown:ENSG00000168769 known_pos_ctrl sequence

SEQ ID NO: 47333 - protein, 85 aa, unidentified; identical to SEQ ID NO: 16137
  REGION 1..85: note = Description of Unknown:ENSG00000168769 known_pos_ctrl sequence

SEQ ID NO: 47334 - protein, 85 aa, unidentified; identical to SEQ ID NO: 16138
  REGION 1..85: note = Description of Unknown:ENSG00000168769 known_pos_ctrl sequence

SEQ ID NO: 47335 - protein, 85 aa, unidentified; identical to SEQ ID NO: 16139
  REGION 1..85: note = Description of Unknown:ENSG00000168769 known_pos_ctrl sequence

SEQ ID NO: 47336 - protein, 85 aa, unidentified; identical to SEQ ID NO: 16140
  REGION 1..85: note = Description of Unknown:ENSG00000168769 known_pos_ctrl sequence

SEQ ID NO: 47337 - protein, 85 aa, unidentified; identical to SEQ ID NO: 16141
  REGION 1..85: note = Description of Unknown:ENSG00000168769 known_pos_ctrl sequence

SEQ ID NO: 47338 - protein, 85 aa, unidentified; identical to SEQ ID NO: 16142
  REGION 1..85: note = Description of Unknown:ENSG00000168769 known_pos_ctrl sequence

SEQ ID NO: 47339 - protein, 85 aa, unidentified; identical to SEQ ID NO: 16143
  REGION 1..85: note = Description of Unknown:ENSG00000168769 known_pos_ctrl sequence

SEQ ID NO: 47340 - protein, 85 aa, unidentified; identical to SEQ ID NO: 16144
  REGION 1..85: note = Description of Unknown:ENSG00000168769 known_pos_ctrl sequence

SEQ ID NO: 47341 - protein, 85 aa, unidentified; identical to SEQ ID NO: 16145
  REGION 1..85: note = Description of Unknown:ENSG00000185122 known_pos_ctrl sequence

SEQ ID NO: 47342 - protein, 85 aa, unidentified; identical to SEQ ID NO: 16146
  REGION 1..85: note = Description of Unknown:ENSG00000185122 known_pos_ctrl sequence

SEQ ID NO: 47343 - protein, 84 aa, unidentified; identical to SEQ ID NO: 16147
  REGION 1..84: note = Description of Unknown:ENSG00000185122 known_pos_ctrl sequence

SEQ ID NO: 47344 - protein, 85 aa, unidentified; identical to SEQ ID NO: 16148
  REGION 1..85: note = Description of Unknown:ENSG00000185122 known_pos_ctrl sequence

SEQ ID NO: 47345 - protein, 85 aa, unidentified; identical to SEQ ID NO: 16149
  REGION 1..85: note = Description of Unknown:ENSG00000185122 known_pos_ctrl sequence

SEQ ID NO: 47346 - protein, 84 aa, unidentified; identical to SEQ ID NO: 16150
  REGION 1..84: note = Description of Unknown:ENSG00000106462 known_pos_ctrl sequence

SEQ ID NO: 47347 - protein, 85 aa, unidentified; identical to SEQ ID NO: 16151
  REGION 1..85: note = Description of Unknown:ENSG00000106462 known_pos_ctrl sequence

SEQ ID NO: 47348 - protein, 85 aa, unidentified; identical to SEQ ID NO: 16152
  REGION 1..85: note = Description of Unknown:ENSG00000106462 known_pos_ctrl sequence

SEQ ID NO: 47349 - protein, 85 aa, unidentified; identical to SEQ ID NO: 16153
  REGION 1..85: note = Description of Unknown:ENSG00000106462 known_pos_ctrl sequence

SEQ ID NO: 47350 - protein, 85 aa, unidentified; identical to SEQ ID NO: 16154
  REGION 1..85: note = Description of Unknown:ENSG00000106462 known_pos_ctrl sequence

SEQ ID NO: 47351 - protein, 24 aa, Homo sapiens
GQETRSEAVGLLWCWKGPVWRQSR

SEQ ID NO: 47352 - protein, 16 aa, Homo sapiens
GRHMSYSTVTSTSLYC

SEQ ID NO: 47353 - protein, 18 aa, Homo sapiens
RMDGTLGKRGQISPTRVC

SEQ ID NO: 47354 - protein, 4 aa, Homo sapiens
WIVP

SEQ ID NO: 47355 - protein, 8 aa, Homo sapiens
TELACYRF

SEQ ID NO: 47356 - protein, 35 aa, Homo sapiens
IPRPEFPEPLTAFVASWFNFYTSSVFEQLMAPRSF

SEQ ID NO: 47357 - protein, 13 aa, Homo sapiens
LRIQYQITFQLDV

SEQ ID NO: 47358 - protein, 21 aa, Homo sapiens
KLALLFPSRLSVMCVSWCPAV

SEQ ID NO: 47359 - protein, 18 aa, Homo sapiens
RMDGTLGKRGQISPTRVC

SEQ ID NO: 47360 - protein, 4 aa, Homo sapiens
WIVP

SEQ ID NO: 47361 - protein, 16 aa, Homo sapiens
TELACYRFISIHRRMF

SEQ ID NO: 47362 - protein, 30 aa, Homo sapiens
IPRPEFPEPLTAFVASWFNFYTSSVFEQLM

SEQ ID NO: 47363 - protein, 4 aa, Homo sapiens
RELT

SEQ ID NO: 47364 - protein, 13 aa, Homo sapiens
LKKSQKTVSSGKV

SEQ ID NO: 47365 - protein, 9 aa, Homo sapiens
VLAVILKKS

SEQ ID NO: 47366 - protein, 9 aa, Homo sapiens
DILKLKLKI

SEQ ID NO: 47367 - protein, 18 aa, Homo sapiens
RKENLISRSCGYSKASKM

SEQ ID NO: 47368 - protein, 11 aa, Homo sapiens
WTIPLIIDFPM

SEQ ID NO: 47369 - protein, 4 aa, Homo sapiens
LMKT

SEQ ID NO: 47370 - protein, 11 aa, Homo sapiens
RVIQDLSMCCL

SEQ ID NO: 47371 - protein, 27 aa, Homo sapiens
IKSRVHLSPWFFLFPHLMTSHSLPPSP

SEQ ID NO: 47372 - protein, 18 aa, Homo sapiens
RKENLISRSCGYSKASKM

SEQ ID NO: 47373 - protein, 11 aa, Homo sapiens
WTIPLIIDFPM

SEQ ID NO: 47374 - protein, 43 aa, Homo sapiens
LMKTSVIALMVIHFWPFRHLLVHNWRYPFQKWVRMDKRNTRSI

SEQ ID NO: 47375 - protein, 27 aa, Homo sapiens
IKSRVHLSPWFFLFPHLMTSHSLPPSP

SEQ ID NO: 47376 - protein, 44 aa, Homo sapiens
LHRNPAWQLKICLSNMSLKEARLCSRHQLQIYLQQDLLVEISLM

SEQ ID NO: 47377 - protein, 25 aa, Homo sapiens
PMAAGAPCTGCARLCTQARGPRPGA

SEQ ID NO: 47378 - protein, 73 aa, Homo sapiens
VMTPRPPAAAPRSPVGPGRRPNVLTPTTRCLSLQMSSWMNPSPLSTTGPASRWASGCRASTWNSMLLSLLHGR

SEQ ID NO: 47379 - protein, 67 aa, Homo sapiens
PMAAGAPCTGCARLCTQARGPRPGALSAWILRGCGAAWTRTSRRPRRSHATGPCTTLRRTRAWPPPP

SEQ ID NO: 47380 - protein, 30 aa, Homo sapiens
VMTPRPPAAAPRSPVGPGRRPNVLTPTTRC

SEQ ID NO: 47381 - protein, 12 aa, Homo sapiens
TGRSCCSWTEAN

SEQ ID NO: 47382 - protein, 13 aa, Homo sapiens
RAWGSATLMTGHW

SEQ ID NO: 47383 - protein, 10 aa, Homo sapiens
RRWQQLPRRS

SEQ ID NO: 47384 - protein, 12 aa, Homo sapiens
AHCESSAKPGQI

SEQ ID NO: 47385 - protein, 6 aa, Homo sapiens
ITWLDN

SEQ ID NO: 47386 - protein, 16 aa, Homo sapiens
NQCLTNGVVTKWPLTR

SEQ ID NO: 47387 - protein, 16 aa, Homo sapiens
TVTSWRPDTLFPDSVC

SEQ ID NO: 47388 - protein, 6 aa, Homo sapiens
KLCKFR

SEQ ID NO: 47389 - protein, 6 aa, Homo sapiens
KSVTHP

SEQ ID NO: 47390 - protein, 7 aa, Homo sapiens
QKLLPIH

SEQ ID NO: 47391 - protein, 4 aa, Homo sapiens
KKST

SEQ ID NO: 47392 - protein, 36 aa, Homo sapiens
DGITCWKRLLSSYSPARPYFSFGKDTRTTPNSVLRQ

SEQ ID NO: 47393 - protein, 43 aa, Homo sapiens
RQPQTRTLPMMRLPHGFKIATTSSKDWAQLKIPSFFSMSWESN

SEQ ID NO: 47394 - protein, 18 aa, Homo sapiens
SNKWMLPQHQLFNRINSL

SEQ ID NO: 47395 - protein, 10 aa, Homo sapiens
VNTCVPWSKL

SEQ ID NO: 47396 - protein, 6 aa, Homo sapiens
KLWRPG

SEQ ID NO: 47397 - protein, 32 aa, Homo sapiens
WKLKKYYKGRTLATHLTSPQSRKGWKNLRDRC

SEQ ID NO: 47398 - protein, 8 aa, Homo sapiens
NSAAWLQI

SEQ ID NO: 47399 - protein, 8 aa, Homo sapiens
MSLDIGYP

SEQ ID NO: 47400 - protein, 5 aa, Homo sapiens
TAIGL

SEQ ID NO: 47401 - protein, 32 aa, Homo sapiens
SPLRLQKDSASCSHFCYNIRLSWKNVKHGWNS

SEQ ID NO: 47402 - protein, 6 aa, Homo sapiens
FRQNKS

SEQ ID NO: 47403 - protein, 28 aa, Homo sapiens
RFQEIISTFWNSREHTSCFKPRCSVVSR

SEQ ID NO: 47404 - protein, 12 aa, Homo sapiens
NKVKLMTGMNST

SEQ ID NO: 47405 - protein, 9 aa, Homo sapiens
HSSVINGRE

SEQ ID NO: 47406 - protein, 39 aa, Homo sapiens
FAGPSRGGGSLTARFASGSAIGRWQKSFVNGWLKCPTSP

SEQ ID NO: 47407 - protein, 7 aa, Homo sapiens
VVSEVFL

SEQ ID NO: 47408 - protein, 44 aa, Homo sapiens
LWRLASNSFSRRTVALRPPCRPNSLKSKRNGNQPACGWKNRRKN

SEQ ID NO: 47409 - protein, 7 aa, Homo sapiens
KTGKNVR

SEQ ID NO: 47410 - protein, 10 aa, Homo sapiens
KMQLGAGQMT

SEQ ID NO: 47411 - protein, 19 aa, Homo sapiens
RTPSLPISVLMISPFLMNA

SEQ ID NO: 47412 - protein, 10 aa, Homo sapiens
SFCKGSGKNY

SEQ ID NO: 47413 - protein, 4 aa, Homo sapiens
GGSK

SEQ ID NO: 47414 - protein, 16 aa, Homo sapiens
MNGQSSVKRTRNSVSG

SEQ ID NO: 47415 - protein, 17 aa, Homo sapiens
LKWKAKFLRMETFSLKK

SEQ ID NO: 47416 - protein, 34 aa, Homo sapiens
RSSRRIIKRKLLLLKRTKYSSNKWENDLLKPAMK

SEQ ID NO: 47417 - protein, 4 aa, Homo sapiens
RRPW

SEQ ID NO: 47418 - protein, 8 aa, Homo sapiens
PCSSLIRT

SEQ ID NO: 47419 - protein, 14 aa, Homo sapiens
GPGSLTSSQSWPSQ

SEQ ID NO: 47420 - protein, 22 aa, Homo sapiens
STIPVTRKKYRESLMSSRSFRE

SEQ ID NO: 47421 - protein, 22 aa, Homo sapiens
KSKRRGDCGRNFWMTIHVLKIG

SEQ ID NO: 47422 - protein, 4 aa, Homo sapiens
SLQK

SEQ ID NO: 47423 - protein, 8 aa, Homo sapiens
SIQLPRKN

SEQ ID NO: 47424 - protein, 13 aa, Homo sapiens
RNLRLSSDRSTSA

SEQ ID NO: 47425 - protein, 4 aa, Homo sapiens
RSWN

SEQ ID NO: 47426 - protein, 46 aa, Homo sapiens
STSSTAAWPGRTALIQHVASNRWFTKATRDGTTCKSVSPPSCADSS

SEQ ID NO: 47427 - protein, 11 aa, Homo sapiens
SNSRPSSRKFH

SEQ ID NO: 47428 - protein, 7 aa, Homo sapiens
TTIRLSR

SEQ ID NO: 47429 - protein, 6 aa, Homo sapiens
LPKENS

SEQ ID NO: 47430 - protein, 14 aa, Homo sapiens
KRVSPWMQRSSRRN

SEQ ID NO: 47431 - protein, 64 aa, Homo sapiens
SACLSQTMSTTSQTGSWSWKTLQLCRTCTGTTALQTACFLHSLPPISPSRSLSPSGASGQDETP

SEQ ID NO: 47432 - protein, 8 aa, Homo sapiens
SPKALRPM

SEQ ID NO: 47433 - protein, 16 aa, Homo sapiens
NSQKMQSKIPPGTTVP

SEQ ID NO: 47434 - protein, 5 aa, Homo sapiens
SHRSD

SEQ ID NO: 47435 - protein, 7 aa, Homo sapiens
TPATKAT

SEQ ID NO: 47436 - protein, 9 aa, Homo sapiens
NCWANAVAV

SEQ ID NO: 47437 - protein, 6 aa, Homo sapiens
RDWSTN

SEQ ID NO: 47438 - protein, 22 aa, Homo sapiens
RRKRRAFLALLTCIVPKPKRLV

SEQ ID NO: 47439 - protein, 4 aa, Homo sapiens
LTDG

SEQ ID NO: 47440 - protein, 13 aa, Homo sapiens
SRTSRSGSSLTQT

SEQ ID NO: 47441 - protein, 57 aa, Homo sapiens
TASGPGWGTRRRSWNSSSVWNSALTSRPSSSRSKSSRSSRKLWTTAKPSSSPSISAA

SEQ ID NO: 47442 - protein, 21 aa, Homo sapiens
MGAGTECALCWRSGGACCRMP

SEQ ID NO: 47443 - protein, 8 aa, Homo sapiens
CSARVSMK

SEQ ID NO: 47444 - protein, 33 aa, Homo sapiens
AMVCFLCWRTLTEGKMKLSLLILTLMQRYFRTI

SEQ ID NO: 47445 - protein, 10 aa, Homo sapiens
SMSCWNPNSE

SEQ ID NO: 47446 - protein, 11 aa, Homo sapiens
PLCKTCLANYW

SEQ ID NO: 47447 - protein, 7 aa, Homo sapiens
MLKEQTV

SEQ ID NO: 47448 - protein, 16 aa, Homo sapiens
KPKKKSMLLEIGSNFS

SEQ ID NO: 47449 - protein, 13 aa, Homo sapiens
RRSVVISRNWRSY

SEQ ID NO: 47450 - protein, 16 aa, Homo sapiens
TCQVVSRICLPGLLLM

SEQ ID NO: 47451 - protein, 16 aa, Homo sapiens
TVTSWRPDTLFPDSVC

SEQ ID NO: 47452 - protein, 34 aa, Homo sapiens
KLCKFRWTIFRISKMIWKNRKGAYRNLALSPTNY

SEQ ID NO: 47453 - protein, 6 aa, Homo sapiens
KSVTHP

SEQ ID NO: 47454 - protein, 6 aa, Homo sapiens
QKLLPI

SEQ ID NO: 47455 - protein, 47 aa, Homo sapiens
DGITCWKRLLSSYSPARPYFSFGKDTRTTPNSVLRQFSSRRIEPMSC

SEQ ID NO: 47456 - protein, 30 aa, Homo sapiens
RQPQTRTLPMMRLPHGFKIATTSSKDWAQL

SEQ ID NO: 47457 - protein, 18 aa, Homo sapiens
SNKWMLPQHQLFNRINSL

SEQ ID NO: 47458 - protein, 31 aa, Homo sapiens
VNTCVPWSKLSANSRLHYRLEFLIMKPLPRV

SEQ ID NO: 47459 - protein, 6 aa, Homo sapiens
KLWRPG

SEQ ID NO: 47460 - protein, 13 aa, Homo sapiens
WKLKKYYKGRTLA

SEQ ID NO: 47461 - protein, 8 aa, Homo sapiens
NSAAWLQI

SEQ ID NO: 47462 - protein, 8 aa, Homo sapiens
MSLDIGYP

SEQ ID NO: 47463 - protein, 10 aa, Homo sapiens
MIRKSKECRI

SEQ ID NO: 47464 - protein, 5 aa, Homo sapiens
TAIGL

SEQ ID NO: 47465 - protein, 27 aa, Homo sapiens
SPLRLQKDSASCSHFCYNIRLSWKNVK

SEQ ID NO: 47466 - protein, 6 aa, Homo sapiens
FRQNKS

SEQ ID NO: 47467 - protein, 40 aa, Homo sapiens
RFQEIISTFWNSREHTSCFKPRCSVVSRFCTQSLLMGNVF

SEQ ID NO: 47468 - protein, 12 aa, Homo sapiens
NKVKLMTGMNST

SEQ ID NO: 47469 - protein, 9 aa, Homo sapiens
HSSVINGRE

SEQ ID NO: 47470 - protein, 4 aa, Homo sapiens
FAGP

SEQ ID NO: 47471 - protein, 35 aa, Homo sapiens
VVSEVFLYHCNKQGPSLMKCSSKKKCFCGNKAATS

SEQ ID NO: 47472 - protein, 13 aa, Homo sapiens
LWRLASNSFSRRT

SEQ ID NO: 47473 - protein, 9 aa, Homo sapiens
KTGKNVRKE

SEQ ID NO: 47474 - protein, 34 aa, Homo sapiens; identical to SEQ ID NO: 4268

SEQ ID NO: 47475 - protein, 4 aa, Homo sapiens
KMQL

SEQ ID NO: 47476 - protein, 19 aa, Homo sapiens
RTPSLPISVLMISPFLMNA

SEQ ID NO: 47477 - protein, 15 aa, Homo sapiens
SFCKGSGKNYATSSP

SEQ ID NO: 47478 - protein, 4 aa, Homo sapiens
GGSK

SEQ ID NO: 47479 - protein, 16 aa, Homo sapiens
MNGQSSVKRTRNSVSG

SEQ ID NO: 47480 - protein, 10 aa, Homo sapiens
LKWKAKFLRM

SEQ ID NO: 47481 - protein, 61 aa, Homo sapiens
RSSRRIIKRKLLLLKRTKYSSNKWENDLLKPAMKAKHLRLNTSWERSTTGGSISWTSLQPG

SEQ ID NO: 47482 - protein, 4 aa, Homo sapiens
RRPW

SEQ ID NO: 47483 - protein, 6 aa, Homo sapiens
PCSSLI

SEQ ID NO: 47484 - protein, 23 aa, Homo sapiens
STIPVTRKKYRESLMSSRSFRET

SEQ ID NO: 47485 - protein, 40 aa, Homo sapiens
RSTVQVLHLSSTCVKSCCTTVTPVPLMPSVTLYSRLRETW

SEQ ID NO: 47486 - protein, 22 aa, Homo sapiens
KSKRRGDCGRNFWMTIHVLKIG

SEQ ID NO: 47487 - protein, 14 aa, Homo sapiens
SLQKGQLLFPALLG

SEQ ID NO: 47488 - protein, 8 aa, Homo sapiens
SIQLPRKN

SEQ ID NO: 47489 - protein, 13 aa, Homo sapiens
RNLRLSSDRSTSA

SEQ ID NO: 47490 - protein, 4 aa, Homo sapiens
RSWN

SEQ ID NO: 47491 - protein, 7 aa, Homo sapiens
TTIRLSR

SEQ ID NO: 47492 - protein, 6 aa, Homo sapiens
LPKENS

SEQ ID NO: 47493 - protein, 14 aa, Homo sapiens
KRVSPWMQRSSRRN

SEQ ID NO: 47494 - protein, 20 aa, Homo sapiens
MSSDGTARRSSGVWKDTIRN

SEQ ID NO: 47495 - protein, 21 aa, Homo sapiens
SACLSQTMSTTSQTGSWSWKT

SEQ ID NO: 47496 - protein, 8 aa, Homo sapiens
SPKALRPM

SEQ ID NO: 47497 - protein, 16 aa, Homo sapiens
NSQKMQSKIPPGTTVP

SEQ ID NO: 47498 - protein, 34 aa, Homo sapiens
SHRSDNWAKPWMIAVFRYSKPKISFAAKLPRGRS

SEQ ID NO: 47499 - protein, 7 aa, Homo sapiens
TPATKAT

SEQ ID NO: 47500 - protein, 4 aa, Homo sapiens
NCWA

SEQ ID NO: 47501 - protein, 6 aa, Homo sapiens
RDWSTN

SEQ ID NO: 47502 - protein, 22 aa, Homo sapiens
RRKRRAFLALLTCIVPKPKRLV

SEQ ID NO: 47503 - protein, 11 aa, Homo sapiens
LTDGSFSRPRH

SEQ ID NO: 47504 - protein, 13 aa, Homo sapiens
SRTSRSGSSLTQT

SEQ ID NO: 47505 - protein, 14 aa, Homo sapiens
TASGPGWGTRRRSW

SEQ ID NO: 47506 - protein, 21 aa, Homo sapiens
MGAGTECALCWRSGGACCRMP

SEQ ID NO: 47507 - protein, 39 aa, Homo sapiens
AMVCFLCWRTLTEGKMKLSLLILTLMQRYFRTITNSLCK

SEQ ID NO: 47508 - protein, 10 aa, Homo sapiens
SMSCWNPNSE

SEQ ID NO: 47509 - protein, 11 aa, Homo sapiens
PLCKTCLANYW

SEQ ID NO: 47510 - protein, 7 aa, Homo sapiens
MLKEQTV

SEQ ID NO: 47511 - protein, 4 aa, Homo sapiens
KPKK

SEQ ID NO: 47512 - protein, 35 aa, Homo sapiens
GLPSRTSTSATGCPLRWNQSLSATDPSGCPSQKPR

SEQ ID NO: 47513 - protein, 40 aa, Homo sapiens
PLKKMKGKRGDEKEIRLQLQSAETRRRRRRSACRKSRRSW

SEQ ID NO: 47514 - protein, 13 aa, Homo sapiens
RLRLRSSRTRSSI

SEQ ID NO: 47515 - protein, 21 aa, Homo sapiens
YTCSTFIGPRVLSGLRMGGLQ

SEQ ID NO: 47516 - protein, 14 aa, Homo sapiens
MIWQTSLSSVGLLR

SEQ ID NO: 47517 - protein, 7 aa, Homo sapiens
TRELGNP

SEQ ID NO: 47518 - protein, 43 aa, Homo sapiens
STSTWTRKQESPKAMPQCPMKTHPLPRLPWNGLMGKIFKGANL

SEQ ID NO: 47519 - protein, 74 aa, Homo sapiens
TVCGVVCHPVRAEACHHHSVEVQEAQEVLGDPWVAWEAVEEIEEASLQEDPGVPEGTPLEEETSSTELETGSVP

SEQ ID NO: 47520 - protein, 74 aa, Homo sapiens
LYAGVVETRTSPGEQSATSVVIVAEVALVACGEEEVASWIVVVPVECSEVAVVETEVASVVAGAWTEVALVEED

SEQ ID NO: 47521 - protein, 31 aa, Homo sapiens
TVCGVVCHPVRAEACHHHSVEVQEAQEVLGD

SEQ ID NO: 47522 - protein, 31 aa, Homo sapiens
LYAGVVETRTSPGEQSATSVVIVAEVALVAC

SEQ ID NO: 47523 - protein, 31 aa, Homo sapiens
WNRWEEEEEDVEDLEKWIKASTVRSAEIGPT

SEQ ID NO: 47524 - protein, 7 aa, Homo sapiens
TKILWVQ

SEQ ID NO: 47525 - protein, 36 aa, Homo sapiens
KSSQKSTVQLTMWISFLAQEIGYRFYRIKLNWPEEG

SEQ ID NO: 47526 - protein, 16 aa, Homo sapiens
KEAQRSRTVMKDWTAL

SEQ ID NO: 47527 - protein, 31 aa, Homo sapiens
DLKILLKKNQMKRHQWVDQNVVMTVGFLAVT

SEQ ID NO: 47528 - protein, 7 aa, Homo sapiens
CQTCDTL

SEQ ID NO: 47529 - protein, 4 aa, Homo sapiens
TMLE

SEQ ID NO: 47530 - protein, 8 aa, Homo sapiens
EFQRLLLK

SEQ ID NO: 47531 - protein, 20 aa, Homo sapiens
RETHLQVLALITWVLYKILV

SEQ ID NO: 47532 - protein, 38 aa, Homo sapiens
QNVERNFRKSSIAVAVKQIRWFVPKLQVNGLLLVQLHS

SEQ ID NO: 47533 - protein, 14 aa, Homo sapiens
LQPFWKLKKAYCLC

SEQ ID NO: 47534 - protein, 21 aa, Homo sapiens
LNFTTNSQENKTPTILLGLMT

SEQ ID NO: 47535 - protein, 7 aa, Homo sapiens
LPWKEFY

SEQ ID NO: 47536 - protein, 7 aa, Homo sapiens
KLHRKVE

SEQ ID NO: 47537 - protein, 11 aa, Homo sapiens
TNASLKRYVEK

SEQ ID NO: 47538 - protein, 41 aa, Homo sapiens
PLLYHLKKSLQQRRKHWTKKKGDRRLERGSRNCLRSLLHDR

SEQ ID NO: 47539 - protein, 33 aa, Homo sapiens
LYCYKHPQFWGSAVTMLSQKSCRSVKRSRFTLG

SEQ ID NO: 47540 - protein, 36 aa, Homo sapiens
GFHYYSVILRIVHVSWQYQLAGKEVFMYKPVVTHYI

SEQ ID NO: 47541 - protein, 39 aa, Homo sapiens
IVINLTWNHYGMTRFFRASRWTKENSRVHSVGSLLTVFF

SEQ ID NO: 47542 - protein, 14 aa, Homo sapiens
RKWRSCRDDRELSQ

SEQ ID NO: 47543 - protein, 7 aa, Homo sapiens
ASVQKQI

SEQ ID NO: 47544 - protein, 6 aa, Homo sapiens
VKKWNL

SEQ ID NO: 47545 - protein, 26 aa, Homo sapiens
KIPLRRNIETIARPRAHQTMIFSLCT

SEQ ID NO: 47546 - protein, 20 aa, Homo sapiens
FIEEAICVQVVQAQLAKGLV

SEQ ID NO: 47547 - protein, 6 aa, Homo sapiens
ISCFMY

SEQ ID NO: 47548 - protein, 21 aa, Homo sapiens
PCTCGFIALTLSIIPGESSPS

SEQ ID NO: 47549 - protein, 19 aa, Homo sapiens
IHSWDMKNNSLRFQFFIMM

SEQ ID NO: 47550 - protein, 13 aa, Homo sapiens
CHNPYAKTTLPAL

SEQ ID NO: 47551 - protein, 47 aa, Homo sapiens
RYFLPYCTHRLLQHSQLNAAKKIGQPGNTRELSKRVHVMQKSLTKYY

SEQ ID NO: 47552 - protein, 10 aa, Homo sapiens
VNYLKESYTM

SEQ ID NO: 47553 - protein, 6 aa, Homo sapiens
LSGVLR

SEQ ID NO: 47554 - protein, 66 aa, Homo sapiens
NHLLKDMQNKERPCLSKSQNGNYHTYYSCLRIITPFFSTTTEKPVVSAPRFLKILLFALCVVLLYA

SEQ ID NO: 47555 - protein, 4 aa, Homo sapiens
KDFA

SEQ ID NO: 47556 - protein, 4 aa, Homo sapiens
SMHR

SEQ ID NO: 47557 - protein, 55 aa, Homo sapiens
LSSFEVTASASGVPCIWMLMERKTGILGEANLSTFVRKDTKFLSNSGFLILLITS

SEQ ID NO: 47558 - protein, 4 aa, Homo sapiens
TMLE

SEQ ID NO: 47559 - protein, 8 aa, Homo sapiens
EFQRLLLK

SEQ ID NO: 47560 - protein, 26 aa, Homo sapiens
RETHLQVLALITWVLYKILVQLKFSV

SEQ ID NO: 47561 - protein, 34 aa, Homo sapiens
QNVERNFRKSSIAVAVKQIRWFVPKLQVNGLLLV

SEQ ID NO: 47562 - protein, 14 aa, Homo sapiens
LQPFWKLKKAYCLC

SEQ ID NO: 47563 - protein, 21 aa, Homo sapiens
LNFTTNSQENKTPTILLGLMT

SEQ ID NO: 47564 - protein, 13 aa, Homo sapiens
SNQKFLNTVMEMV

SEQ ID NO: 47565 - protein, 7 aa, Homo sapiens
LPWKEFY

SEQ ID NO: 47566 - protein, 7 aa, Homo sapiens
KLHRKVE

SEQ ID NO: 47567 - protein, 10 aa, Homo sapiens
TNASLKRYVE

SEQ ID NO: 47568 - protein, 41 aa, Homo sapiens
LYCYKHPQFWGSAVTMLSQKSCRSVKRSRFTLGIPVQPFMM

SEQ ID NO: 47569 - protein, 33 aa, Homo sapiens
GFHYYSVILRIVHVSWQYQLAGKEVFMYKPVVT

SEQ ID NO: 47570 - protein, 14 aa, Homo sapiens
RKWRSCRDDRELSQ

SEQ ID NO: 47571 - protein, 6 aa, Homo sapiens
VKKWNL

SEQ ID NO: 47572 - protein, 32 aa, Homo sapiens
KIPLRRNIETIARPRAHQTMIFSLCTLLLEPI

SEQ ID NO: 47573 - protein, 20 aa, Homo sapiens
FIEEAICVQVVQAQLAKGLV

SEQ ID NO: 47574 - protein, 6 aa, Homo sapiens
ISCFMY

SEQ ID NO: 47575 - protein, 19 aa, Homo sapiens
IHSWDMKNNSLRFQFFIMM

SEQ ID NO: 47576 - protein, 8 aa, Homo sapiens
HPFCSSRS

SEQ ID NO: 47577 - protein, 13 aa, Homo sapiens
CHNPYAKTTLPAL

SEQ ID NO: 47578 - protein, 19 aa, Homo sapiens
RYFLPYCTHRLLQHSQLNA

SEQ ID NO: 47579 - protein, 52 aa, Homo sapiens
VNYLKESYTMKKELRNVQWLTLLLGLLNPWKNAYRTSAYLFSESPAFFSTTF

SEQ ID NO: 47580 - protein, 6 aa, Homo sapiens
LSGVLR

SEQ ID NO: 47581 - protein, 28 aa, Homo sapiens
NHLLKDMQNKERPCLSKSQNGNYHTYYS

SEQ ID NO: 47582 - protein, 28 aa, Homo sapiens
KDFAASNKVTVNVYCTLRTVVQEQVFSF

SEQ ID NO: 47583 - protein, 4 aa, Homo sapiens
SMHR

SEQ ID NO: 47584 - protein, 12 aa, Homo sapiens
LSSFEVTASASG

SEQ ID NO: 47585 - protein, 47 aa, Homo sapiens
MQLEAKVVVIPLHLQHELSIYRILLTIGVVDMLCHILQYSNKLIHGV

SEQ ID NO: 47586 - protein, 17 aa, Homo sapiens
HHRNYSIWNSSAQIEII

SEQ ID NO: 47587 - protein, 5 aa, Homo sapiens
IQHRN

SEQ ID NO: 47588 - protein, 5 aa, Homo sapiens
CNNTK

SEQ ID NO: 47589 - protein, 36 aa, Homo sapiens
DQQELHRYDLLEFLMGQQLTHHCLQTQSLASSHSLL

SEQ ID NO: 47590 - protein, 30 aa, Homo sapiens
PECLASLSLESVLPALGSLWPMDPFLQAMF

SEQ ID NO: 47591 - protein, 4 aa, Homo sapiens
AIII

SEQ ID NO: 47592 - protein, 25 aa, Homo sapiens
QEVEVMETCLTCSETHSLYLITAQT

SEQ ID NO: 47593 - protein, 38 aa, Homo sapiens
PAAQRSRGKTNYLTPLRGFTKVRVHIRQVLMVNDLSLP

SEQ ID NO: 47594 - protein, 23 aa, Homo sapiens
HRGLLSITSPLTLLPQVDNKALP

SEQ ID NO: 47595 - protein, 10 aa, Homo sapiens
PKRASLQETY

SEQ ID NO: 47596 - protein, 22 aa, Homo sapiens
RCLKQAGTLERHLTALPVSRDF

SEQ ID NO: 47597 - protein, 18 aa, Homo sapiens
RQMLFAVLAMEILSHQVY

SEQ ID NO: 47598 - protein, 10 aa, Homo sapiens
VQTILSSLPC

SEQ ID NO: 47599 - protein, 48 aa, Homo sapiens
WEKPITMWVLEPVTKSITSTQLFIQRLITLLPLHHLQPFQQQHLLQNP

SEQ ID NO: 47600 - protein, 30 aa, Homo sapiens
KQICFWLTTNLVHRSYHQCLCPYTPAQQKF

SEQ ID NO: 47601 - protein, 5 aa, Homo sapiens
RHAGI

SEQ ID NO: 47602 - protein, 14 aa, Homo sapiens
VKMAYLTVAFCWIN

SEQ ID NO: 47603 - protein, 32 aa, Homo sapiens
IHLHLVFTWKINVMLSFLHYINFVQIRTTLLQ

SEQ ID NO: 47604 - protein, 9 aa, Homo sapiens
YVALLELLS

SEQ ID NO: 47605 - protein, 18 aa, Homo sapiens
TWDFSLLKLWWKLTMNIW

SEQ ID NO: 47606 - protein, 34 aa, Homo sapiens; identical to SEQ ID NO: 6878

SEQ ID NO: 47607 - protein, 5 aa, Homo sapiens
SLGPI

SEQ ID NO: 47608 - protein, 15 aa, Homo sapiens
LNFLLLCVSYQQEIF

SEQ ID NO: 47609 - protein, 9 aa, Homo sapiens
AMLVIPYWA

SEQ ID NO: 47610 - protein, 6 aa, Homo sapiens
TQFNYT

SEQ ID NO: 47611 - protein, 20 aa, Homo sapiens
KFQGAEHQVIRKITTSVQLT

SEQ ID NO: 47612 - protein, 15 aa, Homo sapiens
ILAQVTVNGLLFLKV

SEQ ID NO: 47613 - protein, 8 aa, Homo sapiens
MTSVKKII

SEQ ID NO: 47614 - protein, 30 aa, Homo sapiens
WVLGGPILKIFMKQMFQCIGLFSDLEIWSG

SEQ ID NO: 47615 - protein, 37 aa, Homo sapiens
MQALFIGFRLLAGATTLLGMLVHLQPASINWQWNGTN

SEQ ID NO: 47616 - protein, 23 aa, Homo sapiens
YPWFIFPGIWHEISRSQIQSFLK

SEQ ID NO: 47617 - protein, 5 aa, Homo sapiens
LSIVF

SEQ ID NO: 47618 - protein, 5 aa, Homo sapiens
SNVRH

SEQ ID NO: 47619 - protein, 36 aa, Homo sapiens
GKLSLLQEKRLYGMGGQKKNQLITVAFVKWRFLICF

SEQ ID NO: 47620 - protein, 17 aa, Homo sapiens
HHRNYSIWNSSAQIEII

SEQ ID NO: 47621 - protein, 5 aa, Homo sapiens
IQHRN

SEQ ID NO: 47622 - protein, 10 aa, Homo sapiens
CWNSWKVSLS

SEQ ID NO: 47623 - protein, 5 aa, Homo sapiens
CNNTK

SEQ ID NO: 47624 - protein, 24 aa, Homo sapiens
DQQELHRYDLLEFLMGQQLTHHCL

SEQ ID NO: 47625 - protein, 44 aa, Homo sapiens
PECLASLSLESVLPALGSLWPMDPFLQAMFPVAHQERWEVQTLF

SEQ ID NO: 47626 - protein, 4 aa, Homo sapiens
AIII

SEQ ID NO: 47627 - protein, 21 aa, Homo sapiens
QEVEVMETCLTCSETHSLYLI

SEQ ID NO: 47628 - protein, 65 aa, Homo sapiens
PAAQRSRGKTNYLTPLRGFTKVRVHIRQVLMVNDLSLPLGLPSISRQLALVFRIRTDIPPCLAIQ

SEQ ID NO: 47629 - protein, 14 aa, Homo sapiens
HRGLLSITSPLTLL

SEQ ID NO: 47630 - protein, 10 aa, Homo sapiens
PKRASLQETY

SEQ ID NO: 47631 - protein, 28 aa, Homo sapiens
RCLKQAGTLERHLTALPVSRDFLIMSIR

SEQ ID NO: 47632 - protein, 18 aa, Homo sapiens
RQMLFAVLAMEILSHQVY

SEQ ID NO: 47633 - protein, 10 aa, Homo sapiens
VQTILSSLPC

SEQ ID NO: 47634 - protein, 5 aa, Homo sapiens
WEKPI

SEQ ID NO: 47635 - protein, 8 aa, Homo sapiens
KQICFWLT

SEQ ID NO: 47636 - protein, 5 aa, Homo sapiens
RHAGI

SEQ ID NO: 47637 - protein, 32 aa, Homo sapiens
VKMAYLTVAFCWINVHLQDHHLHHTLPCQRTS

SEQ ID NO: 47638 - protein, 23 aa, Homo sapiens
IHLHLVFTWKINVMLSFLHYINF

SEQ ID NO: 47639 - protein, 9 aa, Homo sapiens
YVALLELLS

SEQ ID NO: 47640 - protein, 18 aa, Homo sapiens
TWDFSLLKLWWKLTMNIW

SEQ ID NO: 47641 - protein, 44 aa, Homo sapiens
GHSCCSQQMKTGIPLEQRKSGIVKVIDLILQLLNMHSTRPPHSR

SEQ ID NO: 47642 - protein, 20 aa, Homo sapiens
SLGPILTYLMTKSGSCSYMS

SEQ ID NO: 47643 - protein, 15 aa, Homo sapiens
LNFLLLCVSYQQEIF

SEQ ID NO: 47644 - protein, 9 aa, Homo sapiens
AMLVIPYWA

SEQ ID NO: 47645 - protein, 20 aa, Homo sapiens
KFQGAEHQVIRKITTSVQLT

SEQ ID NO: 47646 - protein, 19 aa, Homo sapiens
ILAQVTVNGLLFLKVTGVF

SEQ ID NO: 47647 - protein, 8 aa, Homo sapiens
MTSVKKII

SEQ ID NO: 47648 - protein, 25 aa, Homo sapiens
WVLGGPILKIFMKQMFQCIGLFSDL

SEQ ID NO: 47649 - protein, 43 aa, Homo sapiens
MQALFIGFRLLAGATTLLGMLVHLQPASINWQWNGTNGTNCKV

SEQ ID NO: 47650 - protein, 23 aa, Homo sapiens
YPWFIFPGIWHEISRSQIQSFLK

SEQ ID NO: 47651 - protein, 5 aa, Homo sapiens
LSIVF

SEQ ID NO: 47652 - protein, 48 aa, Homo sapiens
GKLSLLQEKRLYGMGGQKKNQLITVAFVKWRFLICFLSLMRVIHERPT

SEQ ID NO: 47653 - protein, 19 aa, Homo sapiens
YIAKIVHEKQAETWKTLWC

SEQ ID NO: 47654 - protein, 7 aa, Homo sapiens
NSTKWRT

SEQ ID NO: 47655 - protein, 5 aa, Homo sapiens
ASSRS

SEQ ID NO: 47656 - protein, 23 aa, Homo sapiens
RSRAWTAGQARRWLSRTCLRDPA

SEQ ID NO: 47657 - protein, 36 aa, Homo sapiens
PGPWRPFSSCGPQNLWTRQLPRPAPLTSPSGGPSRQ

SEQ ID NO: 47658 - protein, 12 aa, Homo sapiens
ACPSATPPCWTR

SEQ ID NO: 47659 - protein, 53 aa, Homo sapiens
TLRSASAGCRLWSATTTILTSTGCGASWRARCHACTPSRCTRTSAPVPSSPSR

SEQ ID NO: 47660 - protein, 53 aa, Homo sapiens
PGPWRPFSSCGPQNLWTRQLPRPAPLTSPSGGPSRQHSSWTGSWMGPRCRRRW

SEQ ID NO: 47661 - protein, 12 aa, Homo sapiens
ACPSATPPCWTR

SEQ ID NO: 47662 - protein, 10 aa, Homo sapiens
TLRSASAGCR

SEQ ID NO: 47663 - protein, 8 aa, Homo sapiens
RSQNSNEV

SEQ ID NO: 47664 - protein, 13 aa, Homo sapiens
KRSLTKPRVCKCN

SEQ ID NO: 47665 - protein, 7 aa, Homo sapiens
MNLSSLN

SEQ ID NO: 47666 - protein, 12 aa, Homo sapiens
SPMRSLKVHVKN

SEQ ID NO: 47667 - protein, 9 aa, Homo sapiens
MNRHNNYRN

SEQ ID NO: 47668 - protein, 31 aa, Homo sapiens
IINLNCTPVRKLTKTKLLEKLLRVSPRQRWS

SEQ ID NO: 47669 - protein, 29 aa, Homo sapiens
EEKINLCVSSIDILPSWSRTSVDWRRTSM

SEQ ID NO: 47670 - protein, 13 aa, Homo sapiens
KRSLTKPRVCKCN

SEQ ID NO: 47671 - protein, 7 aa, Homo sapiens
MNLSSLN

SEQ ID NO: 47672 - protein, 12 aa, Homo sapiens
SPMRSLKVHVKN

SEQ ID NO: 47673 - protein, 13 aa, Homo sapiens
IMHYFGKSRHKCY

SEQ ID NO: 47674 - protein, 9 aa, Homo sapiens
MNRHNNYRN

SEQ ID NO: 47675 - protein, 18 aa, Homo sapiens
IINLNCTPVRKLTKTKLL

SEQ ID NO: 47676 - protein, 48 aa, Homo sapiens
EEKINLCVSSIDILPSWSRTSVDWRRTSMMQRVPSAWQPKTKNVLLIT

SEQ ID NO: 47677 - protein, 19 aa, Homo sapiens
KIRFTRSEIRSRCHGLRQV

SEQ ID NO: 47678 - protein, 5 aa, Homo sapiens
RILIS

SEQ ID NO: 47679 - protein, 14 aa, Homo sapiens
GQHTIHLLHVVQIL

SEQ ID NO: 47680 - protein, 26 aa, Homo sapiens
RERLGTISGQVSLILTSPLTPLPMRW

SEQ ID NO: 47681 - protein, 5 aa, Homo sapiens
PGFDG

SEQ ID NO: 47682 - protein, 26 aa, Homo sapiens
RERLGTISGQVSLILTSPLTPLPMRW

SEQ ID NO: 47683 - protein, 21 aa, Homo sapiens
PGFDGYFGWRRQGTVVRWIPR

SEQ ID NO: 47684 - protein, 6 aa, Homo sapiens
NEPLAW

SEQ ID NO: 47685 - protein, 10 aa, Homo sapiens
SHNRVQALET

SEQ ID NO: 47686 - protein, 28 aa, Homo sapiens
YYCVGVWKGPQVTMVVKLRIENQYFQGT

SEQ ID NO: 47687 - protein, 20 aa, Homo sapiens
RKPLQGGVILCGIQIVWLNQ

SEQ ID NO: 47688 - protein, 49 aa, Homo sapiens
VVALEASTCQEETQKAPAMTRRLRTCYGTTCYMAQSAGHLSPVTVRGPM

SEQ ID NO: 47689 - protein, 20 aa, Homo sapiens
IPFTQGPNVTPKRMFFSRII

SEQ ID NO: 47690 - protein, 16 aa, Homo sapiens
SGRGMSAKRWICLCWK

SEQ ID NO: 47691 - protein, 4 aa, Homo sapiens
VASS

SEQ ID NO: 47692 - protein, 9 aa, Homo sapiens
AGSMPISKE

SEQ ID NO: 47693 - protein, 12 aa, Homo sapiens
VIRCWEMLSLLD

SEQ ID NO: 47694 - protein, 17 aa, Homo sapiens
HFFHSYIDFSVRRALTN

SEQ ID NO: 47695 - protein, 5 aa, Homo sapiens
SPFQL

SEQ ID NO: 47696 - protein, 34 aa, Homo sapiens
RKPLQGGVILCGIQIVWLNQNLNQQPSARALDRV

SEQ ID NO: 47697 - protein, 27 aa, Homo sapiens
VVALEASTCQEETQKAPAMTRRLRTCY

SEQ ID NO: 47698 - protein, 36 aa, Homo sapiens
IPFTQGPNVTPKRMFFSRIIYSGFRIQVLPLIELVQ

SEQ ID NO: 47699 - protein, 16 aa, Homo sapiens
SGRGMSAKRWICLCWK

SEQ ID NO: 47700 - protein, 4 aa, Homo sapiens
VASS

SEQ ID NO: 47701 - protein, 12 aa, Homo sapiens
VIRCWEMLSLLD

SEQ ID NO: 47702 - protein, 17 aa, Homo sapiens
HFFHSYIDFSVRRALTN

SEQ ID NO: 47703 - protein, 8 aa, Homo sapiens
SPFQLRRS

SEQ ID NO: 47704 - protein, 16 aa, Homo sapiens
LSFVGHHLLHLLLFCR

SEQ ID NO: 47705 - protein, 15 aa, Homo sapiens
LIFLKDCVLLGCFFS

SEQ ID NO: 47706 - protein, 5 aa, Homo sapiens
CVWQR

SEQ ID NO: 47707 - protein, 51 aa, Homo sapiens
KRNGRKRRGSVCGRQALWPSTRLPGARGPNWPWTTSADGPKSTRTGGFRRR

SEQ ID NO: 47708 - protein, 5 aa, Homo sapiens
RCRRR

SEQ ID NO: 47709 - protein, 9 aa, Homo sapiens
MRRFPREQT

SEQ ID NO: 47710 - protein, 12 aa, Homo sapiens
NSMDSTSTLAGK

SEQ ID NO: 47711 - protein, 31 aa, Homo sapiens
SVCWMKKHKTPCKSQTHLRPSGTRKLTFWTQ

SEQ ID NO: 47712 - protein, 5 aa, Homo sapiens
EDGPL

SEQ ID NO: 47713 - protein, 18 aa, Homo sapiens
TRKGALTDTRSASALILD

SEQ ID NO: 47714 - protein, 20 aa, Homo sapiens
CGISKERNPERKEVEMQILS

SEQ ID NO: 47715 - protein, 7 aa, Homo sapiens
KRSHRGM

SEQ ID NO: 47716 - protein, 4 aa, Homo sapiens
FKKL

SEQ ID NO: 47717 - protein, 17 aa, Homo sapiens
QELPLFLCQEGRRSSTV

SEQ ID NO: 47718 - protein, 6 aa, Homo sapiens
WSSRNL

SEQ ID NO: 47719 - protein, 13 aa, Homo sapiens
TALPATCSIPDHR

SEQ ID NO: 47720 - protein, 23 aa, Homo sapiens
YIHKTSERRAWQTHRCNCESSFS

SEQ ID NO: 47721 - protein, 8 aa, Homo sapiens
EMQGSRTS

SEQ ID NO: 47722 - protein, 15 aa, Homo sapiens
RNIRQSSFNSRKTHG

SEQ ID NO: 47723 - protein, 17 aa, Homo sapiens
QELPLFLCQEGRRSSTV

SEQ ID NO: 47724 - protein, 6 aa, Homo sapiens
WSSRNL

SEQ ID NO: 47725 - protein, 16 aa, Homo sapiens
TALPATCSIPDHRSKC

SEQ ID NO: 47726 - protein, 27 aa, Homo sapiens
IFRSEKKKRKEETPLRQSCTATRNNEM

SEQ ID NO: 47727 - protein, 10 aa, Homo sapiens
YIHKTSERRA

SEQ ID NO: 47728 - protein, 8 aa, Homo sapiens
EMQGSRTS

SEQ ID NO: 47729 - protein, 15 aa, Homo sapiens
RNIRQSSFNSRKTHG

SEQ ID NO: 47730 - protein, 7 aa, Homo sapiens
DYFRIRL

SEQ ID NO: 47731 - protein, 7 aa, Homo sapiens
RNRECTF

SEQ ID NO: 47732 - protein, 24 aa, Homo sapiens
IVRRHICKFSSSNREKNSCISTKV

SEQ ID NO: 47733 - protein, 8 aa, Homo sapiens
KGPHGDNA

SEQ ID NO: 47734 - protein, 5 aa, Homo sapiens
CSVAV

SEQ ID NO: 47735 - protein, 17 aa, Homo sapiens
ELPAASCLPFGKAVDIS

SEQ ID NO: 47736 - protein, 18 aa, Homo sapiens
TAGYERQCSKCHLLWGQD

SEQ ID NO: 47737 - protein, 72 aa, Homo sapiens
GQSGDCGYHHQRRSNLHGYCINDHSGHLYLRPWYSSQDQESDHGERHLPSEVGFRSKGKSEEADDQAGPSGQ

SEQ ID NO: 47738 - protein, 26 aa, Homo sapiens
TAGYERQCSKCHLLWGQDYASRCSSI

SEQ ID NO: 47739 - protein, 29 aa, Homo sapiens
GQSGDCGYHHQRRSNLHGYCINDHSGHLY

SEQ ID NO: 47740 - protein, 4 aa, Homo sapiens
WQAP

SEQ ID NO: 47741 - protein, 21 aa, Homo sapiens
SWRISSGWPRRRRVRPSAWPL

SEQ ID NO: 47742 - protein, 4 aa, Homo sapiens
WQAP

SEQ ID NO: 47743 - protein, 21 aa, Homo sapiens
SWRISSGWPRRRRVRPSAWPL

SEQ ID NO: 47744 - protein, 35 aa, Homo sapiens
RSGRSTCTRRSCLARGEKSERPTSWRRSGKPTMRR

SEQ ID NO: 47745 - protein, 7 aa, Homo sapiens
GLRRRPR

SEQ ID NO: 47746 - protein, 20 aa, Homo sapiens
SPRSRSSCSVPSPSWPAPSY

SEQ ID NO: 47747 - protein, 49 aa, Homo sapiens
TRSSSAPHLCAAWLASRRLWPQGRQRAHGGSGPEGSSQETLPAFSPPAP

SEQ ID NO: 47748 - protein, 25 aa, Homo sapiens
LEQITSLFCRGAAPPPHSLPQRLPW

SEQ ID NO: 47749 - protein, 48 aa, Homo sapiens
RDRSCCCSRHPLERPPPRPAAPMSTRLTTAASSPWSRPMFPGSRPCRT

SEQ ID NO: 47750 - protein, 5 aa, Homo sapiens
STPWT

SEQ ID NO: 47751 - protein, 5 aa, Homo sapiens
DPSWK

SEQ ID NO: 47752 - protein, 20 aa, Homo sapiens
SPRSRSSCSVPSPSWPAPSY

SEQ ID NO: 47753 - protein, 44 aa, Homo sapiens
PPRCMGPADTSPQAPLCPWPCHLVAMAQPHLTMAPPLGPRAGGS

SEQ ID NO: 47754 - protein, 6 aa, Homo sapiens
TRSSSA

SEQ ID NO: 47755 - protein, 49 aa, Homo sapiens
LEQITSLFCRGAAPPPHSLPQRLPWPARWPPAPALCATAGPSSALPGST

SEQ ID NO: 47756 - protein, 17 aa, Homo sapiens
RDRSCCCSRHPLERPPP

SEQ ID NO: 47757 - protein, 5 aa, Homo sapiens
STPWT

SEQ ID NO: 47758 - protein, 47 aa, Homo sapiens
DPSWKEAVPAATAPSRKRTTLPSHLPVWWTPPPGAARRRPPPGEVVS

SEQ ID NO: 47759 - protein, 4 aa, Homo sapiens
LMVL

SEQ ID NO: 47760 - protein, 19 aa, Homo sapiens
RMWKPHVRLWCVPRTCPCQ

SEQ ID NO: 47761 - protein, 14 aa, Homo sapiens
SLWVWVVLTLRPWS

SEQ ID NO: 47762 - protein, 46 aa, Homo sapiens
APREALAQTVLAEVPTQLVSYFRAQGWAPLKPLPPSAKDPAQAPQA

SEQ ID NO: 47763 - protein, 5 aa, Homo sapiens
VPLEA

SEQ ID NO: 47764 - protein, 19 aa, Homo sapiens
RMWKPHVRLWCVPRTCPCQ

SEQ ID NO: 47765 - protein, 46 aa, Homo sapiens
SLWVWVVLTLRPWSSWTLMVDPCIHVLGRLLPATLCSLYPTAGSRM

SEQ ID NO: 47766 - protein, 9 aa, Homo sapiens
APREALAQT

SEQ ID NO: 47767 - protein, 10 aa, Homo sapiens
HRMQMLHSRN

SEQ ID NO: 47768 - protein, 26 aa, Homo sapiens
SYCFIVLLCCFHKAKCMVMWIPYLLC

SEQ ID NO: 47769 - protein, 26 aa, Homo sapiens
SYCFIVLLCCFHKAKCMVMWIPYLLC

SEQ ID NO: 47770 - protein, 6 aa, Homo sapiens
IEPKFV

SEQ ID NO: 47771 - protein, 31 aa, Homo sapiens
YPVPSLERGIFILLKYRETKYQTAMTKSQQI

SEQ ID NO: 47772 - protein, 13 aa, Homo sapiens
STGRCSGGAAAHR

SEQ ID NO: 47773 - protein, 33 aa, Homo sapiens
QQVSQILPSPWISSELSCSPASTRRSRLSSTST

SEQ ID NO: 47774 - protein, 7 aa, Homo sapiens
SSSRRQH

SEQ ID NO: 47775 - protein, 12 aa, Homo sapiens
TCETMLGRRWTQ

SEQ ID NO: 47776 - protein, 7 aa, Homo sapiens
SSSRRQH

SEQ ID NO: 47777 - protein, 14 aa, Homo sapiens
TCETMLGRRWTQSS

SEQ ID NO: 47778 - protein, 39 aa, Homo sapiens
SRKPVGAAWSRCVVDQVIMAPFGIMGMSTLLPPCLSGVV

SEQ ID NO: 47779 - protein, 4 aa, Homo sapiens
QGSR

SEQ ID NO: 47780 - protein, 32 aa, Homo sapiens
ALLHPAGLPGGAAGPGPRADGAEGGSPDAGAG

SEQ ID NO: 47781 - protein, 18 aa, Homo sapiens
SPPAGEGPAHPTGAAAAL

SEQ ID NO: 47782 - protein, 28 aa, Homo sapiens
LTSMPLSTTGCWAVCPSLRSLAGLSTVP

SEQ ID NO: 47783 - protein, 9 aa, Homo sapiens
LVLPWSPNI

SEQ ID NO: 47784 - protein, 7 aa, Homo sapiens
VWHYSAK

SEQ ID NO: 47785 - protein, 5 aa, Homo sapiens
QRYFI

SEQ ID NO: 47786 - protein, 11 aa, Homo sapiens
RSKTTRRVGLR

SEQ ID NO: 47787 - protein, 4 aa, Homo sapiens
FEID

SEQ ID NO: 47788 - protein, 8 aa, Homo sapiens
RQNHLKKI

SEQ ID NO: 47789 - protein, 16 aa, Homo sapiens
RNCQRHAALVMESPLS

SEQ ID NO: 47790 - protein, 46 aa, Homo sapiens
ICRICIWQSPHKRSKWDRSIKALVSPPEEILIPQTVLPCKESIANV

SEQ ID NO: 47791 - protein, 13 aa, Homo sapiens
TSQNNWSPQPQPS

SEQ ID NO: 47792 - protein, 5 aa, Homo sapiens
QRYFI

SEQ ID NO: 47793 - protein, 11 aa, Homo sapiens
RSKTTRRVGLR

SEQ ID NO: 47794 - protein, 4 aa, Homo sapiens
FEID

SEQ ID NO: 47795 - protein, 14 aa, Homo sapiens
RQNHLKKIPSWNNL

SEQ ID NO: 47796 - protein, 16 aa, Homo sapiens
RNCQRHAALVMESPLS

SEQ ID NO: 47797 - protein, 17 aa, Homo sapiens
ICRICIWQSPHKRSKWD

SEQ ID NO: 47798 - protein, 42 aa, Homo sapiens
RVYGRNAAALSQALRLEAPELPVKVNPTKPRRGSFEVTLLRP

SEQ ID NO: 47799 - protein, 78 aa, Homo sapiens
RVYGRNAAALSQALRLEAPELPVKVNPTKPRRGSFEVTLLRPDGSSAELWTGIKKGPPRKLKFPEPQEVVEELKKYLS

SEQ ID NO: 47800 - protein, 6 aa, Homo sapiens
QRLPWA

SEQ ID NO: 47801 - protein, 8 aa, Homo sapiens
LRAQGWTL

SEQ ID NO: 47802 - protein, 35 aa, Homo sapiens
TGRLPMPQWRAVPGRPGLCSQLHVPLLGGLCGCPL

SEQ ID NO: 47803 - protein, 4 aa, Homo sapiens
GKCG

SEQ ID NO: 47804 - protein, 7 aa, Homo sapiens
LPDAALC

SEQ ID NO: 47805 - protein, 5 aa, Homo sapiens
RCHLP

SEQ ID NO: 47806 - protein, 12 aa, Homo sapiens
GLCWTLLHHQPG

SEQ ID NO: 47807 - protein, 32 aa, Homo sapiens
LCQPPMPERGPLSGPCPRLRLPLPQWLWWQDL

SEQ ID NO: 47808 - protein, 28 aa, Homo sapiens
ACLTCPRPPNHSGHPSRAHLSCSGTCHG

SEQ ID NO: 47809 - protein, 54 aa, Homo sapiens
LGGPGGVWGPHCCPGSGYCVADPEGLAPGCLPPWTLLLPCPTLCSSVPGPGVSG

SEQ ID NO: 47810 - protein, 4 aa, Homo sapiens
GKCG

SEQ ID NO: 47811 - protein, 7 aa, Homo sapiens
LPDAALC

SEQ ID NO: 47812 - protein, 5 aa, Homo sapiens
RCHLP

SEQ ID NO: 47813 - protein, 10 aa, Homo sapiens
RHKPLLLPLS

SEQ ID NO: 47814 - protein, 12 aa, Homo sapiens
GLCWTLLHHQPG

SEQ ID NO: 47815 - protein, 18 aa, Homo sapiens
LCQPPMPERGPLSGPCPR

SEQ ID NO: 47816 - protein, 55 aa, Homo sapiens
ACLTCPRPPNHSGHPSRAHLSCSGTCHGASPPQRRGWSAADLSEGGGAEARGWAR

SEQ ID NO: 47817 - protein, 12 aa, Homo sapiens
LGGPGGVWGPHC

SEQ ID NO: 47818 - protein, 12 aa, Homo sapiens
KNKNYSSQPMLP

SEQ ID NO: 47819 - protein, 10 aa, Homo sapiens
QMLPAESRSP

SEQ ID NO: 47820 - protein, 9 aa, Homo sapiens
RRRFSRSSR

SEQ ID NO: 47821 - protein, 24 aa, Homo sapiens
LCPAQCLEGMCPLPHATAVEALLP

SEQ ID NO: 47822 - protein, 21 aa, Homo sapiens
MEGKRSLLPAQFLDVKRDTRM

SEQ ID NO: 47823 - protein, 5 aa, Homo sapiens
SITLR

SEQ ID NO: 47824 - protein, 9 aa, Homo sapiens
RRRFSRSSR

SEQ ID NO: 47825 - protein, 25 aa, Homo sapiens
LCPAQCLEGMCPLPHATAVEALLPP

SEQ ID NO: 47826 - protein, 40 aa, Homo sapiens
PHPSPPPLHSAAALRQAASMTRRRWTMRSRTAMSPGPQRV

SEQ ID NO: 47827 - protein, 21 aa, Homo sapiens
MEGKRSLLPAQFLDVKRDTRM

SEQ ID NO: 47828 - protein, 47 aa, Homo sapiens
SITLRMVTEHRFVSANHSSVAVGRVTRQLRACGTTQSISIPRCRLRL

SEQ ID NO: 47829 - protein, 15 aa, Homo sapiens
SQPRPQRQASPVAWW

SEQ ID NO: 47830 - protein, 26 aa, Homo sapiens
TTLTVPKQRNSTSACFLGLRPLYQRF

SEQ ID NO: 47831 - protein, 6 aa, Homo sapiens
QRALKT

SEQ ID NO: 47832 - protein, 10 aa, Homo sapiens
KTKLKMQVNP

SEQ ID NO: 47833 - protein, 10 aa, Homo sapiens
ILYMDMAAKV

SEQ ID NO: 47834 - protein, 4 aa, Homo sapiens
LISC

SEQ ID NO: 47835 - protein, 17 aa, Homo sapiens
RDMLFLMYGMVIESAQE

SEQ ID NO: 47836 - protein, 8 aa, Homo sapiens
NFLVYMNK

SEQ ID NO: 47837 - protein, 25 aa, Homo sapiens
NLQNSLFGLLAVRLTSPYFLPRIWL

SEQ ID NO: 47838 - protein, 32 aa, Homo sapiens
LPLKLLQNKPEEFFKPTTQKIMDSYPIHFWKM

SEQ ID NO: 47839 - protein, 4 aa, Homo sapiens
KHWT

SEQ ID NO: 47840 - protein, 4 aa, Homo sapiens
LISC

SEQ ID NO: 47841 - protein, 17 aa, Homo sapiens
RDMLFLMYGMVIESAQE

SEQ ID NO: 47842 - protein, 10 aa, Homo sapiens
NFLVYMNKQQ

SEQ ID NO: 47843 - protein, 8 aa, Homo sapiens
DTVRLVLT

SEQ ID NO: 47844 - protein, 21 aa, Homo sapiens
NLQNSLFGLLAVRLTSPYFLP

SEQ ID NO: 47845 - protein, 6 aa, Homo sapiens
YTSPAT

SEQ ID NO: 47846 - protein, 43 aa, Homo sapiens
LSRTQMNSTRPVPSASLPTGNKNLSCFSFISAGSQWKAWLTSV

SEQ ID NO: 47847 - protein, 38 aa, Homo sapiens
RVDTQKVTQVCQAASRLLSPPLALYLLRRMSGRWHSLS

SEQ ID NO: 47848 - protein, 39 aa, Homo sapiens
PSLYLLPTSVAQRRLLKMRTPSSKMEVLLNLQICTARAK

SEQ ID NO: 47849 - protein, 10 aa, Homo sapiens
MLTTSRAPDT

SEQ ID NO: 47850 - protein, 34 aa, Homo sapiens
TSPKGKGSSLMLKDTVFLMAGLRTLQVLKPKVLI

SEQ ID NO: 47851 - protein, 5 aa, Homo sapiens
KYHAS

SEQ ID NO: 47852 - protein, 5 aa, Homo sapiens
HLKTP

SEQ ID NO: 47853 - protein, 25 aa, Homo sapiens
MWVSKLFPTVASQRLRVSLNIRCLN

SEQ ID NO: 47854 - protein, 34 aa, Homo sapiens; identical to SEQ ID NO: 9669

SEQ ID NO: 47855 - protein, 4 aa, Homo sapiens
MPSR

SEQ ID NO: 47856 - protein, 8 aa, Homo sapiens
PIPFIPRF

SEQ ID NO: 47857 - protein, 4 aa, Homo sapiens
KTKS

SEQ ID NO: 47858 - protein, 10 aa, Homo sapiens
RQALPSWGPI

SEQ ID NO: 47859 - protein, 10 aa, Homo sapiens
LLQRPLLWTA

SEQ ID NO: 47860 - protein, 5 aa, Homo sapiens
RLWRL

SEQ ID NO: 47861 - protein, 30 aa, Homo sapiens
TYLCLALPPVSLSHLCPRRPLPGLDSLPNR

SEQ ID NO: 47862 - protein, 10 aa, Homo sapiens
MLTTSRAPDT

SEQ ID NO: 47863 - protein, 5 aa, Homo sapiens
KYHAS

SEQ ID NO: 47864 - protein, 24 aa, Homo sapiens
HLKTPGPDLFIEHLRKPQRACLKT

SEQ ID NO: 47865 - protein, 22 aa, Homo sapiens
MWVSKLFPTVASQRLRVSLNIR

SEQ ID NO: 47866 - protein, 16 aa, Homo sapiens
MPSRRLNIKQALCAPL

SEQ ID NO: 47867 - protein, 8 aa, Homo sapiens
PIPFIPRF

SEQ ID NO: 47868 - protein, 4 aa, Homo sapiens
KTKS

SEQ ID NO: 47869 - protein, 10 aa, Homo sapiens
RQALPSWGPI

SEQ ID NO: 47870 - protein, 4 aa, Homo sapiens
LLQR

SEQ ID NO: 47871 - protein, 5 aa, Homo sapiens
RLWRL

SEQ ID NO: 47872 - protein, 72 aa, Homo sapiens
TYLCLALPPVSLSHLCPRRPLPGLDSLPNRPCFPSPISLWDPLELFLPIPARWMRKSVRGCLEEEEENLEDG

SEQ ID NO: 47873 - protein, 11 aa, Homo sapiens
NYMDVTEESLV

SEQ ID NO: 47874 - protein, 13 aa, Homo sapiens
SLGLTTRTSTKKQ

SEQ ID NO: 47875 - protein, 5 aa, Homo sapiens
KLEHF

SEQ ID NO: 47876 - protein, 7 aa, Homo sapiens
ICLVFQT

SEQ ID NO: 47877 - protein, 12 aa, Homo sapiens
LKTAIFIPTYCV

SEQ ID NO: 47878 - protein, 11 aa, Homo sapiens
WKSTSLMKCIA

SEQ ID NO: 47879 - protein, 4 aa, Homo sapiens
LATW

SEQ ID NO: 47880 - protein, 4 aa, Homo sapiens
HLIL

SEQ ID NO: 47881 - protein, 13 aa, Homo sapiens
LKWQKLLSTMYKL

SEQ ID NO: 47882 - protein, 6 aa, Homo sapiens
LSLWWY

SEQ ID NO: 47883 - protein, 40 aa, Homo sapiens
NCSFYWMTVSSGLCLILLKSIMKRTKKISHGLISESGTKL

SEQ ID NO: 47884 - protein, 10 aa, Homo sapiens
RKLLMRKNKN

SEQ ID NO: 47885 - protein, 12 aa, Homo sapiens
LKTAIFIPTYCV

SEQ ID NO: 47886 - protein, 11 aa, Homo sapiens
WKSTSLMKCIA

SEQ ID NO: 47887 - protein, 4 aa, Homo sapiens
LATW

SEQ ID NO: 47888 - protein, 8 aa, Homo sapiens
LEWEKWIF

SEQ ID NO: 47889 - protein, 4 aa, Homo sapiens
HLIL

SEQ ID NO: 47890 - protein, 13 aa, Homo sapiens
LKWQKLLSTMYKL

SEQ ID NO: 47891 - protein, 6 aa, Homo sapiens
LSLWWY

SEQ ID NO: 47892 - protein, 12 aa, Homo sapiens
MPPLVLLRLITQ

SEQ ID NO: 47893 - protein, 32 aa, Homo sapiens
LLTKLEITGVSWFQELIKSQHLLEGIIQLPRM

SEQ ID NO: 47894 - protein, 31 aa, Homo sapiens
LSRVKALFRSTSHLFDPQQIQTMNQRKEKGL

SEQ ID NO: 47895 - protein, 37 aa, Homo sapiens
LKTFQRRMVWKASCYAPPQIWLWLFIDTIPTKTYQSF

SEQ ID NO: 47896 - protein, 24 aa, Homo sapiens
TIHILQILPIWDQKTCSYLLKLYS

SEQ ID NO: 47897 - protein, 48 aa, Homo sapiens
LSRVKALFRSTSHLFDPQQIQTMNQRKEKGLAAAPMMPVIQLLKSLKL

SEQ ID NO: 47898 - protein, 24 aa, Homo sapiens
LKTFQRRMVWKASCYAPPQIWLWL

SEQ ID NO: 47899 - protein, 16 aa, Homo sapiens
TAAALSILPSIYRQRR

SEQ ID NO: 47900 - protein, 53 aa, Homo sapiens
RKTDWISTRAGKVTSKCTASIWPCLSHSASPSRTCPNFVGRSTRSCVTANSLC

SEQ ID NO: 47901 - protein, 8 aa, Homo sapiens
PGGKRSCP

SEQ ID NO: 47902 - protein, 39 aa, Homo sapiens
RGAPWAGSLGSPPWTTEMWMSCWNSSTARSPKSPTAPGP

SEQ ID NO: 47903 - protein, 14 aa, Homo sapiens
KRRKRRRPSWQQKL

SEQ ID NO: 47904 - protein, 33 aa, Homo sapiens
SRQIVFLEAGSQGLPGRGSWSGPTGNWIGSTAS

SEQ ID NO: 47905 - protein, 28 aa, Homo sapiens
AAVCRRSKTLSKTPSVPASVCVSSAWTA

SEQ ID NO: 47906 - protein, 22 aa, Homo sapiens
LWAPLRTTRYKLQASQPHHGQK

SEQ ID NO: 47907 - protein, 9 aa, Homo sapiens
EAPTHHGQR

SEQ ID NO: 47908 - protein, 13 aa, Homo sapiens
GGPLPVSSPRTGS

SEQ ID NO: 47909 - protein, 62 aa, Homo sapiens
SGSRHPSRATPAPRSQAQRKFPVASRSCLSLCPQVGSHRRARGRAVRPRRARQAQPPGPQPA

SEQ ID NO: 47910 - protein, 10 aa, Homo sapiens
RFPVPRARSL

SEQ ID NO: 47911 - protein, 4 aa, Homo sapiens
SFPK

SEQ ID NO: 47912 - protein, 71 aa, Homo sapiens
AAVLRLERGAGGAGQDQVGLAVPKLRRRRAAPGETGQARPRHGLRSRSLCSPQAQQGHRACPRARAAAAGA

SEQ ID NO: 47913 - protein, 14 aa, Homo sapiens
KRRKRRRPSWQQKL

SEQ ID NO: 47914 - protein, 19 aa, Homo sapiens
SRQIVFLEAGSQGLPGRGS

SEQ ID NO: 47915 - protein, 65 aa, Homo sapiens
AAVCRRSKTLSKTPSVPASVCVSSAWTAMASLRRGLLSLSLRVYPPQTSVAPQSSSLTSTLTCPL

SEQ ID NO: 47916 - protein, 4 aa, Homo sapiens
LWAP

SEQ ID NO: 47917 - protein, 9 aa, Homo sapiens
EAPTHHGQR

SEQ ID NO: 47918 - protein, 13 aa, Homo sapiens
GGPLPVSSPRTGS

SEQ ID NO: 47919 - protein, 11 aa, Homo sapiens
GDSTPCPTYPG

SEQ ID NO: 47920 - protein, 30 aa, Homo sapiens
SGSRHPSRATPAPRSQAQRKFPVASRSCLS

SEQ ID NO: 47921 - protein, 18 aa, Homo sapiens
RFPVPRARSLAPSSQAGS

SEQ ID NO: 47922 - protein, 4 aa, Homo sapiens
SFPK

SEQ ID NO: 47923 - protein, 28 aa, Homo sapiens
AAVLRLERGAGGAGQDQVGLAVPKLRRR

SEQ ID NO: 47924 - protein, 17 aa, Homo sapiens
KMPAQPYCRWRRGSTSH

SEQ ID NO: 47925 - protein, 54 aa, Homo sapiens
DTWTSHVKPTITSAPACTRWSSSQMASCASWWSPWRPPSHSSWFTSASSNCLSA

SEQ ID NO: 47926 - protein, 45 aa, Homo sapiens
RNHQPIYIRSSGRPSVRGLCWAAPLMSPVQPKPKPSPARSWLRVM

SEQ ID NO: 47927 - protein, 16 aa, Homo sapiens
NHLYKCTLRGVVNFLC

SEQ ID NO: 47928 - protein, 9 aa, Homo sapiens
RKQYITFSS

SEQ ID NO: 47929 - protein, 7 aa, Homo sapiens
LKLLIQR

SEQ ID NO: 47930 - protein, 40 aa, Homo sapiens
CRGFHPAAGGRETLAPLPPHCAPGTRVQRGGRGKDRQAGA

SEQ ID NO: 47931 - protein, 6 aa, Homo sapiens
VYAEAG

SEQ ID NO: 47932 - protein, 11 aa, Homo sapiens
FVVLSQRNHSS

SEQ ID NO: 47933 - protein, 47 aa, Homo sapiens
ALHLQRHPSQPPFHILLGEVGVPRPRVGRSLQIWNLSMMRGLKRPGC

SEQ ID NO: 47934 - protein, 13 aa, Homo sapiens
CPQTTAFPCHLHT

SEQ ID NO: 47935 - protein, 6 aa, Homo sapiens
RGGDTT

SEQ ID NO: 47936 - protein, 41 aa, Homo sapiens
HHRSHHGTDRLLYRCRCRSLVHVPAKHCPQQPPGCHWRWYS

SEQ ID NO: 47937 - protein, 27 aa, Homo sapiens
GQRTGLAEGRPLHRSQGPLQLVTRGNF

SEQ ID NO: 47938 - protein, 27 aa, Homo sapiens
GQRTGLAEGRPLHRSQGPLQLVTRGNF

SEQ ID NO: 47939 - protein, 20 aa, Homo sapiens
LVRSHHHPVCSRSVLRRRLD

SEQ ID NO: 47940 - protein, 19 aa, Homo sapiens
NALPTRPQIEKCLHSHTVG

SEQ ID NO: 47941 - protein, 52 aa, Homo sapiens
IGRRRRRTERRRKWRLWGLARGGTPPCGMKTTRVTWRRRSRRKKRVCSGPVA

SEQ ID NO: 47942 - protein, 25 aa, Homo sapiens
AGPAGTTWTMCGRRRTRRKTWTTTW

SEQ ID NO: 47943 - protein, 19 aa, Homo sapiens
GGRMRRTRRKCWRRLRKRI

SEQ ID NO: 47944 - protein, 41 aa, Homo sapiens
TPSPHCPRLQPLGGASHALSAERAFLGGASAPTCSWPIWSR

SEQ ID NO: 47945 - protein, 13 aa, Homo sapiens
FGRCTQPLVEGAA

SEQ ID NO: 47946 - protein, 5 aa, Homo sapiens
SSSAR

SEQ ID NO: 47947 - protein, 40 aa, Homo sapiens
TKRPSVWCAENPGATNSTAWCHWRRWCRSTRPNCRGTWNH

SEQ ID NO: 47948 - protein, 9 aa, Homo sapiens
GSTWRQCRR

SEQ ID NO: 47949 - protein, 7 aa, Homo sapiens
KPRRRGE

SEQ ID NO: 47950 - protein, 32 aa, Homo sapiens
AGPAGTTWTMCGRRRTRRKTWTTTWGTWRRRT

SEQ ID NO: 47951 - protein, 19 aa, Homo sapiens
GGRMRRTRRKCWRRLRKRI

SEQ ID NO: 47952 - protein, 14 aa, Homo sapiens
TPSPHCPRLQPLGG

SEQ ID NO: 47953 - protein, 13 aa, Homo sapiens
FGRCTQPLVEGAA

SEQ ID NO: 47954 - protein, 12 aa, Homo sapiens
PIRASVPNTKKP

SEQ ID NO: 47955 - protein, 5 aa, Homo sapiens
SSSAR

SEQ ID NO: 47956 - protein, 24 aa, Homo sapiens
TKRPSVWCAENPGATNSTAWCHWR

SEQ ID NO: 47957 - protein, 9 aa, Homo sapiens
GSTWRQCRR

SEQ ID NO: 47958 - protein, 7 aa, Homo sapiens
KPRRRGE

SEQ ID NO: 47959 - protein, 13 aa, Homo sapiens
SQSWQRWPRSLGD

SEQ ID NO: 47960 - protein, 29 aa, Homo sapiens
HGFWLKSRQGWNGVSERCMKPSWGVREPR

SEQ ID NO: 47961 - protein, 22 aa, Homo sapiens
RSWRTFSSRSFPPLPGRAWCCS

SEQ ID NO: 47962 - protein, 12 aa, Homo sapiens
SSLTSGCQAMPW

SEQ ID NO: 47963 - protein, 11 aa, Homo sapiens
GASEWLISGTC

SEQ ID NO: 47964 - protein, 10 aa, Homo sapiens
PWMTWGPCMD

SEQ ID NO: 47965 - protein, 23 aa, Homo sapiens
TCMETWSWTQSLKRWTSSIRSYC

SEQ ID NO: 47966 - protein, 15 aa, Homo sapiens
SPSTWRCIGPSSLLM

SEQ ID NO: 47967 - protein, 13 aa, Homo sapiens
GDAPSPILTRSVP

SEQ ID NO: 47968 - protein, 16 aa, Homo sapiens
TAAALSILPSIYRQRR

SEQ ID NO: 47969 - protein, 5 aa, Homo sapiens
RKTDW

SEQ ID NO: 47970 - protein, 12 aa, Homo sapiens
SSLTSGCQAMPW

SEQ ID NO: 47971 - protein, 11 aa, Homo sapiens
GASEWLISGTC

SEQ ID NO: 47972 - protein, 17 aa, Homo sapiens
PWMTWGPCMDRTGSMTR

SEQ ID NO: 47973 - protein, 23 aa, Homo sapiens
TCMETWSWTQSLKRWTSSIRSYC

SEQ ID NO: 47974 - protein, 9 aa, Homo sapiens
SPSTWRCIG

SEQ ID NO: 47975 - protein, 13 aa, Homo sapiens
GDAPSPILTRSVP

SEQ ID NO: 47976 - protein, 16 aa, Homo sapiens
TAAALSILPSIYRQRR

SEQ ID NO: 47977 - protein, 16 aa, Homo sapiens
RKTDWISTRAGKVTSK

SEQ ID NO: 47978 - protein, 30 aa, Homo sapiens
MWPGRIMTVTVVLLCCSTASIWPCLSHSAS

SEQ ID NO: 47979 - protein, 7 aa, Homo sapiens
IFGGKQE

SEQ ID NO: 47980 - protein, 25 aa, Homo sapiens
APSSVLAGKSSLRWTESPRWTETGE

SEQ ID NO: 47981 - protein, 10 aa, Homo sapiens
GVGKARSGSG

SEQ ID NO: 47982 - protein, 15 aa, Homo sapiens
RRTLGRRSRERRKVM

SEQ ID NO: 47983 - protein, 21 aa, Homo sapiens
GQKEWKNFVKTLVLNLKILLC

SEQ ID NO: 47984 - protein, 17 aa, Homo sapiens
RGNWRLKAWDFLPRKNG

SEQ ID NO: 47985 - protein, 21 aa, Homo sapiens
LHYSVTAQKSYKTNLTFCAHS

SEQ ID NO: 47986 - protein, 9 aa, Homo sapiens
MIFRHLRIS

SEQ ID NO: 47987 - protein, 21 aa, Homo sapiens
LHYSVTAQKSYKTNLTFCAHS

SEQ ID NO: 47988 - protein, 33 aa, Homo sapiens
MIFRHLRISTDMPLILQGIKIREALILILLNLC

SEQ ID NO: 47989 - protein, 17 aa, Homo sapiens
LFCLGGHGHCFQYFTST

SEQ ID NO: 47990 - protein, 13 aa, Homo sapiens
AKEFCVSCHLTSY

SEQ ID NO: 47991 - protein, 15 aa, Homo sapiens
KNVGSLLVYGIIWSW

SEQ ID NO: 47992 - protein, 4 aa, Homo sapiens
RQSL

SEQ ID NO: 47993 - protein, 32 aa, Homo sapiens
NHREEKKQILMNYCRCTMTQSNTKERKMELSW

SEQ ID NO: 47994 - protein, 14 aa, Homo sapiens
VRVWISQMTMPVLS

SEQ ID NO: 47995 - protein, 6 aa, Homo sapiens
EFLFQM

SEQ ID NO: 47996 - protein, 4 aa, Homo sapiens
KIYS

SEQ ID NO: 47997 - protein, 25 aa, Homo sapiens
PVLLLRALMAMPKAGSPILKWLMLP

SEQ ID NO: 47998 - protein, 24 aa, Homo sapiens
LQLLMKQLTSTQEIYCHHQQHWCC

SEQ ID NO: 47999 - protein, 32 aa, Homo sapiens; identical to SEQ ID NO: 47993

SEQ ID NO: 48000 - protein, 6 aa, Homo sapiens
QFVVVK

SEQ ID NO: 48001 - protein, 14 aa, Homo sapiens
VRVWISQMTMPVLS

SEQ ID NO: 48002 - protein, 6 aa, Homo sapiens
EFLFQM

SEQ ID NO: 48003 - protein, 4 aa, Homo sapiens
KIYS

SEQ ID NO: 48004 - protein, 7 aa, Homo sapiens
PVLLLRA

SEQ ID NO: 48005 - protein, 13 aa, Homo sapiens
STGRCSGGAAAHR

SEQ ID NO: 48006 - protein, 33 aa, Homo sapiens; identical to SEQ ID NO: 47773

SEQ ID NO: 48007 - protein, 11 aa, Homo sapiens
RLNCSFQMEKK

SEQ ID NO: 48008 - protein, 4 aa, Homo sapiens
PMSF

SEQ ID NO: 48009 - protein, 21 aa, Homo sapiens
MNLPPLCWDLEPTKPWGWGAP

SEQ ID NO: 48010 - protein, 12 aa, Homo sapiens
NPLSYPPGWWRR

SEQ ID NO: 48011 - protein, 6 aa, Homo sapiens
ESIWRH

SEQ ID NO: 48012 - protein, 11 aa, Homo sapiens
RLNCSFQMEKK

SEQ ID NO: 48013 - protein, 6 aa, Homo sapiens
PMSFQE

SEQ ID NO: 48014 - protein, 39 aa, Homo sapiens
SVAVRQKKNVPIEEAPFLKRGKDGLLDTSCQATGQPPAW

SEQ ID NO: 48015 - protein, 63 aa, Homo sapiens
MNLPPLCWDLEPTKPWGWGAPEEESTSSTHTSLSMQLTPRISTGWLSSITCGQQGARWPTSSS

SEQ ID NO: 48016 - protein, 5 aa, Homo sapiens
RSMTT

SEQ ID NO: 48017 - protein, 26 aa, Homo sapiens
KSPFSCPRSVRSMARMRPQLTLRWRT

SEQ ID NO: 48018 - protein, 27 aa, Homo sapiens
PAGSQLTGRSSWPHWVLKRRLRRPRRT

SEQ ID NO: 48019 - protein, 19 aa, Homo sapiens
ALPHLGMDSMLLVVLIVEW

SEQ ID NO: 48020 - protein, 16 aa, Homo sapiens
IYTIKILVSKKQTQSQ

SEQ ID NO: 48021 - protein, 8 aa, Homo sapiens
TWLQVLLL

SEQ ID NO: 48022 - protein, 15 aa, Homo sapiens
PSILLQKSWQLLQKK

SEQ ID NO: 48023 - protein, 14 aa, Homo sapiens
TSASHCFGNGSWNV

SEQ ID NO: 48024 - protein, 5 aa, Homo sapiens
LVGIS

SEQ ID NO: 48025 - protein, 25 aa, Homo sapiens
DYFRMLLGYQNLNCFGKILSIILRP

SEQ ID NO: 48026 - protein, 19 aa, Homo sapiens
VLSSQVSYSFFSQEHPENS

SEQ ID NO: 48027 - protein, 39 aa, Homo sapiens
HPGCDLVNKSDTKIGSSASTCQLQIVSLCAVTSFATSVG

SEQ ID NO: 48028 - protein, 7 aa, Homo sapiens
STLLMKY

SEQ ID NO: 48029 - protein, 14 aa, Homo sapiens
VQISCPGGPSLVGS

SEQ ID NO: 48030 - protein, 11 aa, Homo sapiens
QRARQMSLPPM

SEQ ID NO: 48031 - protein, 10 aa, Homo sapiens
NQPSWSCTTP

SEQ ID NO: 48032 - protein, 52 aa, Homo sapiens
SPTQPSLPHSWTSCAASFPTSIHHWRATCGRVSFPPSTTLWRNGSWRVKSIG

SEQ ID NO: 48033 - protein, 19 aa, Homo sapiens
VLSSQVSYSFFSQEHPENS

SEQ ID NO: 48034 - protein, 10 aa, Homo sapiens
PRTWRLNSSS

SEQ ID NO: 48035 - protein, 31 aa, Homo sapiens
HPGCDLVNKSDTKIGSSASTCQLQIVSLCAV

SEQ ID NO: 48036 - protein, 7 aa, Homo sapiens
STLLMKY

SEQ ID NO: 48037 - protein, 14 aa, Homo sapiens
VQISCPGGPSLVGS

SEQ ID NO: 48038 - protein, 30 aa, Homo sapiens
QRARQMSLPPMPSWLCFMTGCSLVQTRIAL

SEQ ID NO: 48039 - protein, 10 aa, Homo sapiens
NQPSWSCTTP

SEQ ID NO: 48040 - protein, 9 aa, Homo sapiens
SPTQPSLPH

SEQ ID NO: 48041 - protein, 9 aa, Homo sapiens
CACRKSFSA

SEQ ID NO: 48042 - protein, 33 aa, Homo sapiens
TTAVYLLSSAVMGLMPVAMALMKQVAAQTPSLA

SEQ ID NO: 48043 - protein, 21 aa, Homo sapiens
PQDPSPPCLAMSPWRTSMGSS

SEQ ID NO: 48044 - protein, 77 aa, Homo sapiens
PQSPTPSPAIGCWTPMMAGGWPCASQPWTWALEMQCMCMTALGPLRAPDYCVVSPTSAMARLSLWRHCLARLLCPTT

SEQ ID NO: 48045 - protein, 9 aa, Homo sapiens
ALAWELAKA

SEQ ID NO: 48046 - protein, 46 aa, Homo sapiens
VSAATVRHSAVTAHGTVLTAQMRRTAQAAHLDTSPVGLLAPLVPQP

SEQ ID NO: 48047 - protein, 8 aa, Homo sapiens
CAACSWSS

SEQ ID NO: 48048 - protein, 27 aa, Homo sapiens
KTFLQRILMITQCWATCVLCYRSYARI

SEQ ID NO: 48049 - protein, 7 aa, Homo sapiens
LQEVAQV

SEQ ID NO: 48050 - protein, 28 aa, Homo sapiens
PQDPSPPCLAMSPWRTSMGSSPLLDIHT

SEQ ID NO: 48051 - protein, 34 aa, Homo sapiens
PQSPTPSPAIGCWTPMMAGGWPCASQPWTWALEM

SEQ ID NO: 48052 - protein, 9 aa, Homo sapiens
ALAWELAKA

SEQ ID NO: 48053 - protein, 50 aa, Homo sapiens
CAACSWSSPWAAPASSMPFAPRSTASLPPSPGWRLRLCSSRHPLPTGSSL

SEQ ID NO: 48054 - protein, 13 aa, Homo sapiens
SMKIKKMQLIIEN

SEQ ID NO: 48055 - protein, 13 aa, Homo sapiens
ARKMLKKFGDMLF

SEQ ID NO: 48056 - protein, 4 aa, Homo sapiens
VCHP

SEQ ID NO: 48057 - protein, 4 aa, Homo sapiens
IQNK

SEQ ID NO: 48058 - protein, 4 aa, Homo sapiens
FPNI

SEQ ID NO: 48059 - protein, 11 aa, Homo sapiens
CTTWPIQVNVE

SEQ ID NO: 48060 - protein, 17 aa, Homo sapiens
LYYKTNQMTSLTGYYLP

SEQ ID NO: 48061 - protein, 8 aa, Homo sapiens
QIGQEAMI

SEQ ID NO: 48062 - protein, 18 aa, Homo sapiens
IIQLMLDLNEMYSEQSQI

SEQ ID NO: 48063 - protein, 43 aa, Homo sapiens
TFWEISRILGAPYQLFVATSQFQIDPVGYIKFKMIHSLQNSFT

SEQ ID NO: 48064 - protein, 19 aa, Homo sapiens
IPSNQLSAFFSVCFIEKKT

SEQ ID NO: 48065 - protein, 13 aa, Homo sapiens
SMKIKKMQLIIEN

SEQ ID NO: 48066 - protein, 13 aa, Homo sapiens
ARKMLKKFGDMLF

SEQ ID NO: 48067 - protein, 6 aa, Homo sapiens
STCKPF

SEQ ID NO: 48068 - protein, 4 aa, Homo sapiens
VCHP

SEQ ID NO: 48069 - protein, 4 aa, Homo sapiens
IQNK

SEQ ID NO: 48070 - protein, 4 aa, Homo sapiens
FPNI

SEQ ID NO: 48071 - protein, 11 aa, Homo sapiens
CTTWPIQVNVE

SEQ ID NO: 48072 - protein, 8 aa, Homo sapiens
QIGQEAMI

SEQ ID NO: 48073 - protein, 20 aa, Homo sapiens
IIQLMLDLNEMYSEQSQIIF

SEQ ID NO: 48074 - protein, 15 aa, Homo sapiens
ISLNLYLLLNITNYL

SEQ ID NO: 48075 - protein, 23 aa, Homo sapiens
TFWEISRILGAPYQLFVATSQFQ

SEQ ID NO: 48076 - protein, 39 aa, Homo sapiens
ISLVGLPDHVCASLGHHWAYLLLLHQQYGSSGNSDHVST

SEQ ID NO: 48077 - protein, 21 aa, Homo sapiens
CLRLLAGGSQTGQLCQVSAAL

SEQ ID NO: 48078 - protein, 16 aa, Homo sapiens
HPFCDLQCCFYGYTTR

SEQ ID NO: 48079 - protein, 21 aa, Homo sapiens
CLRLLAGGSQTGQLCQVSAAL

SEQ ID NO: 48080 - protein, 28 aa, Homo sapiens
HPFCDLQCCFYGYTTRNLSILDSEHDPL

SEQ ID NO: 48081 - protein, 29 aa, Homo sapiens
ELGDNRALCFMVAPQWPAADPTASACHLV

SEQ ID NO: 48082 - protein, 17 aa, Homo sapiens
TQGSALTDLLMKAVYMD

SEQ ID NO: 48083 - protein, 19 aa, Homo sapiens
ALPHLGMDSMLLVVLIVEW

SEQ ID NO: 48084 - protein, 16 aa, Homo sapiens
IYTIKILVSKKQTQSQ

SEQ ID NO: 48085 - protein, 8 aa, Homo sapiens
TWLQVLLL

SEQ ID NO: 48086 - protein, 9 aa, Homo sapiens
PSILLQKSW

SEQ ID NO: 48087 - protein, 41 aa, Homo sapiens
GNAISCGMMATAVLSTTLRDPPLRPTPAHSVMITKMKMKKQ

SEQ ID NO: 48088 - protein, 27 aa, Homo sapiens
GYTALSWTFKCSVWFGFAPDNRCVGNL

SEQ ID NO: 48089 - protein, 12 aa, Homo sapiens
SRFNCTDLGCEN

SEQ ID NO: 48090 - protein, 30 aa, Homo sapiens
SQCTHIIWTYKCSCYSEMSGCRTTNYYRKP

SEQ ID NO: 48091 - protein, 6 aa, Homo sapiens
YYNSIM

SEQ ID NO: 48092 - protein, 14 aa, Homo sapiens
LIFGRETRKICSER

SEQ ID NO: 48093 - protein, 7 aa, Homo sapiens
YHLTFKQ

SEQ ID NO: 48094 - protein, 4 aa, Homo sapiens
QLWV

SEQ ID NO: 48095 - protein, 17 aa, Homo sapiens
ILISILGKPWIKWSLIS

SEQ ID NO: 48096 - protein, 25 aa, Homo sapiens
SFLRSMEYMFVEKVESMKLSLWIAL

SEQ ID NO: 48097 - protein, 30 aa, Homo sapiens
SFLRSMEYMFVEKVESMKLSLWIALYLRRK

SEQ ID NO: 48098 - protein, 6 aa, Homo sapiens
LWIHQK

SEQ ID NO: 48099 - protein, 16 aa, Homo sapiens
SYIQLMHLHLWLIYAF

SEQ ID NO: 48100 - protein, 8 aa, Homo sapiens
NCTWRTSA

SEQ ID NO: 48101 - protein, 25 aa, Homo sapiens
RSLREVFSALFAILPSVQHRVLSST

SEQ ID NO: 48102 - protein, 45 aa, Homo sapiens
RSLREVFSALFAILPSVQHRVLSSTRRLAGGMPGLCARLTAVERG

SEQ ID NO: 48103 - protein, 5 aa, Homo sapiens
RARMP

SEQ ID NO: 48104 - protein, 10 aa, Homo sapiens
KDTRKMSTLY

SEQ ID NO: 48105 - protein, 4 aa, Homo sapiens
YMEK

SEQ ID NO: 48106 - protein, 11 aa, Homo sapiens
IQKHRLDWKLY

SEQ ID NO: 48107 - protein, 4 aa, Homo sapiens
KLQE

SEQ ID NO: 48108 - protein, 19 aa, Homo sapiens
ENCPRLMVKPLQILKYFGG

SEQ ID NO: 48109 - protein, 17 aa, Homo sapiens
HRLLVVRWMKLLLHLPV

SEQ ID NO: 48110 - protein, 12 aa, Homo sapiens
MLCESYSLKGEV

SEQ ID NO: 48111 - protein, 12 aa, Homo sapiens
MNTQRKGRASFV

SEQ ID NO: 48112 - protein, 31 aa, Homo sapiens
LVLLDTMSLHRFCWQCMQMWKIGESKVTLHL

SEQ ID NO: 48113 - protein, 5 aa, Homo sapiens
WLLLM

SEQ ID NO: 48114 - protein, 25 aa, Homo sapiens
LIKQMLMHSLQQAIQHLHMLVLEAM

SEQ ID NO: 48115 - protein, 31 aa, Homo sapiens
RCSWNPVLVLRTIMKMVIPLLWKLEVLDMWK

SEQ ID NO: 48116 - protein, 4 aa, Homo sapiens
PDCC

SEQ ID NO: 48117 - protein, 8 aa, Homo sapiens
KMGLALIR

SEQ ID NO: 48118 - protein, 6 aa, Homo sapiens
LVTKDT

SEQ ID NO: 48119 - protein, 23 aa, Homo sapiens
RWCDFFWKQARIKSIKQMKCTLL

SEQ ID NO: 48120 - protein, 10 aa, Homo sapiens
WRLAWMAMLK

SEQ ID NO: 48121 - protein, 10 aa, Homo sapiens
LGYFLTAVPK

SEQ ID NO: 48122 - protein, 10 aa, Homo sapiens
TCLLIHLSHH

SEQ ID NO: 48123 - protein, 9 aa, Homo sapiens
LWLHVVGMW

SEQ ID NO: 48124 - protein, 33 aa, Homo sapiens
WKQLEKDMKKWWHYFLVKEQISMHRQKKLKKLP

SEQ ID NO: 48125 - protein, 14 aa, Homo sapiens
LWLAVEAFWKWQTF

SEQ ID NO: 48126 - protein, 6 aa, Homo sapiens
LRQEPI

SEQ ID NO: 48127 - protein, 4 aa, Homo sapiens
LNTY

SEQ ID NO: 48128 - protein, 16 aa, Homo sapiens
LQELTFMQQQQQGIQH

SEQ ID NO: 48129 - protein, 10 aa, Homo sapiens
HMPVKMVILM

SEQ ID NO: 48130 - protein, 21 aa, Homo sapiens
QMSYFRQAQIWNMNLKVEELL

SEQ ID NO: 48131 - protein, 13 aa, Homo sapiens
KLQELVMFVLFSS

SEQ ID NO: 48132 - protein, 37 aa, Homo sapiens
IEPQLIMTILYCPWLVQGVIWQWWNYFWLMGQILLTV

SEQ ID NO: 48133 - protein, 6 aa, Homo sapiens
KMAQLC

SEQ ID NO: 48134 - protein, 31 aa, Homo sapiens
KQQKVAIQVLFAISWIILITCFQPLHQMSLS

SEQ ID NO: 48135 - protein, 66 aa, Homo sapiens
IGLLVYQFKHCPWLFHLRSLTNHLPMLPPLFPSGIKLLLNKSPAAICQQTARMYRVTSPISLQRAL

SEQ ID NO: 48136 - protein, 6 aa, Homo sapiens
KRLRES

SEQ ID NO: 48137 - protein, 5 aa, Homo sapiens
QNWNR

SEQ ID NO: 48138 - protein, 5 aa, Homo sapiens
NESYN

SEQ ID NO: 48139 - protein, 5 aa, Homo sapiens
KLSSS

SEQ ID NO: 48140 - protein, 4 aa, Homo sapiens
KSSI

SEQ ID NO: 48141 - protein, 16 aa, Homo sapiens
RLKLKEFNFSNSSNSL

SEQ ID NO: 48142 - protein, 70 aa, Homo sapiens
LLLELESSFLRETMHGYSKWILFYLKMNPSRLLLRWVLRQSSLWRCLKLCLWRQVPCLQGPSQILQNCKE

SEQ ID NO: 48143 - protein, 6 aa, Homo sapiens
LDSQYW

SEQ ID NO: 48144 - protein, 6 aa, Homo sapiens
QKHNKG

SEQ ID NO: 48145 - protein, 63 aa, Homo sapiens
PALLRPSMTRWMTSWQSVEEHLQCQTLLPTVLLHPFPNLRLQLQVLSSLLQPCFLSTLPLILM

SEQ ID NO: 48146 - protein, 15 aa, Homo sapiens
HLPVLVATRNWYKHC

SEQ ID NO: 48147 - protein, 5 aa, Homo sapiens
REELV

SEQ ID NO: 48148 - protein, 52 aa, Homo sapiens
STETRKVLLHSSWLPQLVMLVLWKYCWTMVQTLKPSLKEPRTHHSPWLVLGE

SEQ ID NO: 48149 - protein, 16 aa, Homo sapiens
LEGQIKSTGMFLITHL

SEQ ID NO: 48150 - protein, 8 aa, Homo sapiens
VWLLLVAM

SEQ ID NO: 48151 - protein, 6 aa, Homo sapiens
TSSKYY

SEQ ID NO: 48152 - protein, 18 aa, Homo sapiens
MQELRLTLELVANWASLL

SEQ ID NO: 48153 - protein, 10 aa, Homo sapiens
MGIQLLLSSC

SEQ ID NO: 48154 - protein, 5 aa, Homo sapiens
TWALT

SEQ ID NO: 48155 - protein, 30 aa, Homo sapiens
PASKEELKWLVFCLIEKQMLNTELRLVSHH

SEQ ID NO: 48156 - protein, 34 aa, Homo sapiens; identical to SEQ ID NO: 10449

SEQ ID NO: 48157 - protein, 5 aa, Homo sapiens
QQIKG

SEQ ID NO: 48158 - protein, 27 aa, Homo sapiens
QQMVDTSMWFSYWCKQVQMWMQQITAR

SEQ ID NO: 48159 - protein, 11 aa, Homo sapiens
LLLWQHLERVM

SEQ ID NO: 48160 - protein, 5 aa, Homo sapiens
RWCAT

SEQ ID NO: 48161 - protein, 11 aa, Homo sapiens
SKKSISFHQIL

SEQ ID NO: 48162 - protein, 9 aa, Homo sapiens
RSVIFVWSQ

SEQ ID NO: 48163 - protein, 18 aa, Homo sapiens
YKPKIDRLLKQTKTPAFC

SEQ ID NO: 48164 - protein, 4 aa, Homo sapiens
TWKS

SEQ ID NO: 48165 - protein, 30 aa, Homo sapiens
GKKVGGWLWLRKEKKEKRREGRKRKNKEGN

SEQ ID NO: 48166 - protein, 11 aa, Homo sapiens
QNLQVPQPLLP

SEQ ID NO: 48167 - protein, 19 aa, Homo sapiens
VYLQPGQLWQVLMVKEIIP

SEQ ID NO: 48168 - protein, 24 aa, Homo sapiens
LQPVQRGKTGKIKLLQKTFKLYLM

SEQ ID NO: 48169 - protein, 17 aa, Homo sapiens
MESPRAAVPARVGTVIT

SEQ ID NO: 48170 - protein, 29 aa, Homo sapiens
GFPAAAMKVVTATAVVRVTIIHQLWSLPL

SEQ ID NO: 48171 - protein, 24 aa, Homo sapiens
AAKSSHQFLLHFQRKRENLFLARL

SEQ ID NO: 48172 - protein, 16 aa, Homo sapiens
QVLSVGKRGKKDGKKL

SEQ ID NO: 48173 - protein, 11 aa, Homo sapiens
EGQRKYLFHQL

SEQ ID NO: 48174 - protein, 16 aa, Homo sapiens
LEEEAVISMLFGSLLV

SEQ ID NO: 48175 - protein, 12 aa, Homo sapiens
GVALNQQDKQLN

SEQ ID NO: 48176 - protein, 16 aa, Homo sapiens
SRIQTKKLMNLFQRIV

SEQ ID NO: 48177 - protein, 8 aa, Homo sapiens
KAPQQIPK

SEQ ID NO: 48178 - protein, 13 aa, Homo sapiens
GHQHLPPLLLTLP

SEQ ID NO: 48179 - protein, 4 aa, Homo sapiens
WELK

SEQ ID NO: 48180 - protein, 9 aa, Homo sapiens
GLVFQFLFH

SEQ ID NO: 48181 - protein, 26 aa, Homo sapiens
HILLHSLHMLCLLLRLSSRSVHQGCP

SEQ ID NO: 48182 - protein, 16 aa, Homo sapiens
PTLEVLFHQLNPLGVR

SEQ ID NO: 48183 - protein, 26 aa, Homo sapiens
ALPELLTRLSLTWCLAIAIRIAVVLR

SEQ ID NO: 48184 - protein, 5 aa, Homo sapiens
IQQVL

SEQ ID NO: 48185 - protein, 37 aa, Homo sapiens
LQAQQLQPVHQLQRCLVHLQMAVQVHLLSEGSFLSQL

SEQ ID NO: 48186 - protein, 8 aa, Homo sapiens
RHPMPPQQ

SEQ ID NO: 48187 - protein, 11 aa, Homo sapiens
KQQTLDLQTAA

SEQ ID NO: 48188 - protein, 4 aa, Homo sapiens
LFLL

SEQ ID NO: 48189 - protein, 14 aa, Homo sapiens
QQVLLQWRCLLLPQ

SEQ ID NO: 48190 - protein, 26 aa, Homo sapiens
LTLCLRHQWDAPSLLLKWKPLLLDHP

SEQ ID NO: 48191 - protein, 42 aa, Homo sapiens
VHKVLVRIQYIQQISLLLPISVPPYHLGPLAHCLKTALLLLM

SEQ ID NO: 48192 - protein, 19 aa, Homo sapiens
HLLQHIWETLLQTFQEVRC

SEQ ID NO: 48193 - protein, 30 aa, Homo sapiens
LRVHQHQMILLHSQYPREFVHHLLPHHQYR

SEQ ID NO: 48194 - protein, 27 aa, Homo sapiens
GQKSPAMCLRTGKFQSLLGLNVLHVSG

SEQ ID NO: 48195 - protein, 17 aa, Homo sapiens
DIVASGPLKGLVAIKTK

SEQ ID NO: 48196 - protein, 10 aa, Homo sapiens
TGVTLGWEIL

SEQ ID NO: 48197 - protein, 24 aa, Homo sapiens
STDRCLTQEYFHNIKQWSEIVQEL

SEQ ID NO: 48198 - protein, 13 aa, Homo sapiens
LLLVHSISMFLQA

SEQ ID NO: 48199 - protein, 17 aa, Homo sapiens
HRLLVVRWMKLLLHLPV

SEQ ID NO: 48200 - protein, 24 aa, Homo sapiens
ELKAQQMQGSRTTAVWQKPVQKEM

SEQ ID NO: 48201 - protein, 12 aa, Homo sapiens
MLCESYSLKGEV

SEQ ID NO: 48202 - protein, 7 aa, Homo sapiens
MNTQRKG

SEQ ID NO: 48203 - protein, 31 aa, Homo sapiens; identical to SEQ ID NO: 48112

SEQ ID NO: 48204 - protein, 11 aa, Homo sapiens
WLLLMEDMSKL

SEQ ID NO: 48205 - protein, 25 aa, Homo sapiens
LIKQMLMHSLQQAIQHLHMLVLEAM

SEQ ID NO: 48206 - protein, 4 aa, Homo sapiens
PDCC

SEQ ID NO: 48207 - protein, 19 aa, Homo sapiens
KMGLALIRILMNLKRVPLP

SEQ ID NO: 48208 - protein, 6 aa, Homo sapiens
LVTKDT

SEQ ID NO: 48209 - protein, 23 aa, Homo sapiens
RWCDFFWKQARIKSIKQMKCTLL

SEQ ID NO: 48210 - protein, 10 aa, Homo sapiens
LGYFLTAVPK

SEQ ID NO: 48211 - protein, 10 aa, Homo sapiens
TCLLIHLSHH

SEQ ID NO: 48212 - protein, 32 aa, Homo sapiens
LWLHVVGMWNLRLYLLKEELAWKRSMMKVIHH

SEQ ID NO: 48213 - protein, 18 aa, Homo sapiens
WKQLEKDMKKWWHYFLVK

SEQ ID NO: 48214 - protein, 14 aa, Homo sapiens
LWLAVEAFWKWQTF

SEQ ID NO: 48215 - protein, 6 aa, Homo sapiens
LRQEPI

SEQ ID NO: 48216 - protein, 5 aa, Homo sapiens
GVLPL

SEQ ID NO: 48217 - protein, 10 aa, Homo sapiens
WKLLKRVIWS

SEQ ID NO: 48218 - protein, 4 aa, Homo sapiens
LNTY

SEQ ID NO: 48219 - protein, 16 aa, Homo sapiens
LQELTFMQQQQQGIQH

SEQ ID NO: 48220 - protein, 6 aa, Homo sapiens
HMPVKM

SEQ ID NO: 48221 - protein, 21 aa, Homo sapiens
QMSYFRQAQIWNMNLKVEELL

SEQ ID NO: 48222 - protein, 13 aa, Homo sapiens
KLQELVMFVLFSS

SEQ ID NO: 48223 - protein, 6 aa, Homo sapiens
LVKERM

SEQ ID NO: 48224 - protein, 36 aa, Homo sapiens
IEPQLIMTILYCPWLVQGVIWQWWNYFWLMGQILLT

SEQ ID NO: 48225 - protein, 31 aa, Homo sapiens; identical to SEQ ID NO: 48134

SEQ ID NO: 48226 - protein, 6 aa, Homo sapiens
LPHPTI

SEQ ID NO: 48227 - protein, 36 aa, Homo sapiens
IGLLVYQFKHCPWLFHLRSLTNHLPMLPPLFPSGIK

SEQ ID NO: 48228 - protein, 6 aa, Homo sapiens
KRLRES

SEQ ID NO: 48229 - protein, 6 aa, Homo sapiens
QNWNRG

SEQ ID NO: 48230 - protein, 36 aa, Homo sapiens
KRMHSCSPWNWLMLTNLPRRRSRSSTKQGRNKFRRN

SEQ ID NO: 48231 - protein, 5 aa, Homo sapiens
NESYN

SEQ ID NO: 48232 - protein, 5 aa, Homo sapiens
KLSSS

SEQ ID NO: 48233 - protein, 4 aa, Homo sapiens
KSSI

SEQ ID NO: 48234 - protein, 22 aa, Homo sapiens
RLKLKEFNFSNSSNSLANTWDY

SEQ ID NO: 48235 - protein, 35 aa, Homo sapiens
LLLELESSFLRETMHGYSKWILFYLKMNPSRLLLR

SEQ ID NO: 48236 - protein, 18 aa, Homo sapiens
LDSQYWAKHSWQGWGKEF

SEQ ID NO: 48237 - protein, 6 aa, Homo sapiens
QKHNKG

SEQ ID NO: 48238 - protein, 20 aa, Homo sapiens
PALLRPSMTRWMTSWQSVEE

SEQ ID NO: 48239 - protein, 15 aa, Homo sapiens
HLPVLVATRNWYKHC

SEQ ID NO: 48240 - protein, 5 aa, Homo sapiens
REELV

SEQ ID NO: 48241 - protein, 9 aa, Homo sapiens
STETRKVLL

SEQ ID NO: 48242 - protein, 16 aa, Homo sapiens
LEGQIKSTGMFLITHL

SEQ ID NO: 48243 - protein, 8 aa, Homo sapiens
VWLLLVAM

SEQ ID NO: 48244 - protein, 6 aa, Homo sapiens
TSSKYY

SEQ ID NO: 48245 - protein, 10 aa, Homo sapiens
MGIQLLLSSC

SEQ ID NO: 48246 - protein, 5 aa, Homo sapiens
TWALT

SEQ ID NO: 48247 - protein, 9 aa, Homo sapiens
KPIGTLPLL

SEQ ID NO: 48248 - protein, 30 aa, Homo sapiens; identical to SEQ ID NO: 48155

SEQ ID NO: 48249 - protein, 32 aa, Homo sapiens
QQIKGITNSVSFLLAGELILMYVTRRGTLHCG

SEQ ID NO: 48250 - protein, 14 aa, Homo sapiens
QQMVDTSMWFSYWC

SEQ ID NO: 48251 - protein, 11 aa, Homo sapiens
LLLWQHLERVM

SEQ ID NO: 48252 - protein, 5 aa, Homo sapiens
RWCAT

SEQ ID NO: 48253 - protein, 13 aa, Homo sapiens
SKKSISFHQILNV

SEQ ID NO: 48254 - protein, 8 aa, Homo sapiens
QPSLIRRC

SEQ ID NO: 48255 - protein, 9 aa, Homo sapiens
RSVIFVWSQ

SEQ ID NO: 48256 - protein, 17 aa, Homo sapiens
YKPKIDRLLKQTKTPAF

SEQ ID NO: 48257 - protein, 30 aa, Homo sapiens; identical to SEQ ID NO: 48165

SEQ ID NO: 48258 - protein, 30 aa, Homo sapiens
KKLKPKIKRTLNSKLLKKKKSLKLKMSLKS

SEQ ID NO: 48259 - protein, 11 aa, Homo sapiens
QNLQVPQPLLP

SEQ ID NO: 48260 - protein, 36 aa, Homo sapiens
LQPVQRGKTGKIKLLQKTFKLYLMIHYQFHTVSQRR

SEQ ID NO: 48261 - protein, 17 aa, Homo sapiens
MESPRAAVPARVGTVIT

SEQ ID NO: 48262 - protein, 11 aa, Homo sapiens
GFPAAAMKVVT

SEQ ID NO: 48263 - protein, 25 aa, Homo sapiens
AAKSSHQFLLHFQRKRENLFLARLQ

SEQ ID NO: 48264 - protein, 31 aa, Homo sapiens; identical to SEQ ID NO: 10426

SEQ ID NO: 48265 - protein, 6 aa, Homo sapiens
QVLSVG

SEQ ID NO: 48266 - protein, 11 aa, Homo sapiens
EGQRKYLFHQL

SEQ ID NO: 48267 - protein, 18 aa, Homo sapiens
LEEEAVISMLFGSLLVHT

SEQ ID NO: 48268 - protein, 12 aa, Homo sapiens
ILINRKTRLETG

SEQ ID NO: 48269 - protein, 12 aa, Homo sapiens
GVALNQQDKQLN

SEQ ID NO: 48270 - protein, 6 aa, Homo sapiens
SRIQTK

SEQ ID NO: 48271 - protein, 8 aa, Homo sapiens
KAPQQIPK

SEQ ID NO: 48272 - protein, 13 aa, Homo sapiens
GHQHLPPLLLTLP

SEQ ID NO: 48273 - protein, 4 aa, Homo sapiens
WELK

SEQ ID NO: 48274 - protein, 29 aa, Homo sapiens
LCHQHLKLPQHSLCLQFLLHPLTKPLRTQ

SEQ ID NO: 48275 - protein, 9 aa, Homo sapiens
GLVFQFLFH

SEQ ID NO: 48276 - protein, 21 aa, Homo sapiens
PTLEVLFHQLNPLGVRFLSGL

SEQ ID NO: 48277 - protein, 26 aa, Homo sapiens
ALPELLTRLSLTWCLAIAIRIAVVLR

SEQ ID NO: 48278 - protein, 5 aa, Homo sapiens
IQQVL

SEQ ID NO: 48279 - protein, 50 aa, Homo sapiens
RHPMPPQQQSQPRQATTTLHPQMPHILCLLPKNTIQYHPHLPHHHQPSQE

SEQ ID NO: 48280 - protein, 49 aa, Homo sapiens
KQQTLDLQTAAVLLGVHQLILISNNLRDLFLRNQDHLFSSLRFLPRKLE

SEQ ID NO: 48281 - protein, 68 aa, Homo sapiens
LTLCLRHQWDAPSLLLKWKPLLLDHPLMAQLPLTRIQLQCKIHLLQSSVSITLKDLTVFPLLSSYLRP

SEQ ID NO: 48282 - protein, 45 aa, Homo sapiens
HLLQHIWETLLQTFQEVRCTDLGHPLEEHPQLLTLTDNIFPRLVC

SEQ ID NO: 48283 - protein, 15 aa, Homo sapiens
LRVHQHQMILLHSQY

SEQ ID NO: 48284 - protein, 44 aa, Homo sapiens
GQKSPAMCLRTGKFQSLLGLNVLHVSGKLERQLHLLLGAICLHQ

SEQ ID NO: 48285 - protein, 17 aa, Homo sapiens
DIVASGPLKGLVAIKTK

SEQ ID NO: 48286 - protein, 6 aa, Homo sapiens
TGVTLG

SEQ ID NO: 48287 - protein, 24 aa, Homo sapiens
STDRCLTQEYFHNIKQWSEIVQEL

SEQ ID NO: 48288 - protein, 31 aa, Homo sapiens
LLLVHSISMFLQATWTFLKLGVCLFLCMGMQ

SEQ ID NO: 48289 - protein, 19 aa, Homo sapiens
HLSLMVLEDPYLMALMLQT

SEQ ID NO: 48290 - protein, 4 aa, Homo sapiens
PSMD

SEQ ID NO: 48291 - protein, 39 aa, Homo sapiens
LRSCYLEWLLLVVLFQDHHQHANQVAAPQELHPPLQIPN

SEQ ID NO: 48292 - protein, 7 aa, Homo sapiens
VIRCQQL

SEQ ID NO: 48293 - protein, 4 aa, Homo sapiens
HMIF

SEQ ID NO: 48294 - protein, 56 aa, Homo sapiens
GRSFQIQLKVHCRVMKDVCLILCVWLTFSWCYYLKDEKLCQSLVLDLQAESQDSGD

SEQ ID NO: 48295 - protein, 11 aa, Homo sapiens
IVLGSAHIGSL

SEQ ID NO: 48296 - protein, 7 aa, Homo sapiens
VIRCQQL

SEQ ID NO: 48297 - protein, 11 aa, Homo sapiens
VCSQHFAEALR

SEQ ID NO: 48298 - protein, 4 aa, Homo sapiens
HMIF

SEQ ID NO: 48299 - protein, 26 aa, Homo sapiens
GRSFQIQLKVHCRVMKDVCLILCVWL

SEQ ID NO: 48300 - protein, 5 aa, Homo sapiens
QPELL

SEQ ID NO: 48301 - protein, 13 aa, Homo sapiens
LQWQELQPDATKA

SEQ ID NO: 48302 - protein, 13 aa, Homo sapiens
KYCLQWLWNILCW

SEQ ID NO: 48303 - protein, 15 aa, Homo sapiens
GDLLQQMKQPRRFNT

SEQ ID NO: 48304 - protein, 6 aa, Homo sapiens
SIVSGV

SEQ ID NO: 48305 - protein, 21 aa, Homo sapiens
KKTHIDSCLVTVMEACLERQQ

SEQ ID NO: 48306 - protein, 33 aa, Homo sapiens
NLDLCGQVPFSILDSSKECYLNLFTMVWMTFRP

SEQ ID NO: 48307 - protein, 13 aa, Homo sapiens
SLNQSVRLKVSFQ

SEQ ID NO: 48308 - protein, 15 aa, Homo sapiens
GDLLQQMKQPRRFNT

SEQ ID NO: 48309 - protein, 17 aa, Homo sapiens
SIVSGVKREFFRRMVIW

SEQ ID NO: 48310 - protein, 21 aa, Homo sapiens
KKTHIDSCLVTVMEACLERQQ

SEQ ID NO: 48311 - protein, 8 aa, Homo sapiens
NLDLCGQV

SEQ ID NO: 48312 - protein, 20 aa, Homo sapiens
TPWPSALTMPCALGPLNLLR

SEQ ID NO: 48313 - protein, 4 aa, Homo sapiens
RRGL

SEQ ID NO: 48314 - protein, 37 aa, Homo sapiens
ADTTSCGARVQRGWCLAPTTSPYSCGPQQRTKSLSLG

SEQ ID NO: 48315 - protein, 27 aa, Homo sapiens
QDTKLSSTRCSSLLTPASWLVPPLTSP

SEQ ID NO: 48316 - protein, 40 aa, Homo sapiens
FSCLSLPGTWLPYAATWLPCTRLRGQLTVGSWSAAAVTAH

SEQ ID NO: 48317 - protein, 34 aa, Homo sapiens
TPWPSALTMPCALGPLNLLRPQLIPKTSKDPCRS

SEQ ID NO: 48318 - protein, 4 aa, Homo sapiens
RRGL

SEQ ID NO: 48319 - protein, 22 aa, Homo sapiens
ADTTSCGARVQRGWCLAPTTSP

SEQ ID NO: 48320 - protein, 67 aa, Homo sapiens
QDTKLSSTRCSSLLTPASWLVPPLTSPSSCGMAGRAKMTFTLSPGVQVARVQRHDLGSLQPLLPGFK

SEQ ID NO: 48321 - protein, 4 aa, Homo sapiens
RCGM

SEQ ID NO: 48322 - protein, 40 aa, Homo sapiens
RPRSWPWTCPATRMRYMLLTGVQMAREWQVVGRTNASGYG

SEQ ID NO: 48323 - protein, 18 aa, Homo sapiens
RMDGTLGKRGQISPTRVC

SEQ ID NO: 48324 - protein, 4 aa, Homo sapiens
WIVP

SEQ ID NO: 48325 - protein, 16 aa, Homo sapiens
TELACYRFISIHRRMF

SEQ ID NO: 48326 - protein, 26 aa, Homo sapiens
IPRPEFPEPLTAFVASWFNFYTSSVF

SEQ ID NO: 48327 - protein, 35 aa, Homo sapiens; identical to SEQ ID NO: 47356

SEQ ID NO: 48328 - protein, 32 aa, Homo sapiens
RSVWSIQRRWCPSVTTPFLLPSPVQNLPQPLR

SEQ ID NO: 48329 - protein, 10 aa, Homo sapiens
DPTEKWLQTS

SEQ ID NO: 48330 - protein, 8 aa, Homo sapiens
HMRRSGST

SEQ ID NO: 48331 - protein, 15 aa, Homo sapiens
TGLWQVPPARRTAPA

SEQ ID NO: 48332 - protein, 54 aa, Homo sapiens
SSVTLREPERTSRNPWLEAQAPGPPAAPAETTVSSSSGLPVWKWRTRVCVAWYR

SEQ ID NO: 48333 - protein, 10 aa, Homo sapiens
DPTEKWLQTS

SEQ ID NO: 48334 - protein, 22 aa, Homo sapiens
HMRRSGSTSSNMTTQKGDSTSR

SEQ ID NO: 48335 - protein, 15 aa, Homo sapiens
TGLWQVPPARRTAPA

SEQ ID NO: 48336 - protein, 11 aa, Homo sapiens
SSVTLREPERT

SEQ ID NO: 48337 - protein, 37 aa, Homo sapiens
VPELLHLQKSGCSHSSAGPLKRPSRLRPWPGKLPKES

SEQ ID NO: 48338 - protein, 8 aa, Homo sapiens
CLVTSLAV

SEQ ID NO: 48339 - protein, 30 aa, Homo sapiens
ITTKSTSTSTRSLSPAQSQPVGSLSTLRNT

SEQ ID NO: 48340 - protein, 40 aa, Homo sapiens
SCTVTPGTTSVSSAPGLSALAATLSSTDVSTLEKNPCSVR

SEQ ID NO: 48341 - protein, 43 aa, Homo sapiens
TGTSASMQRRWLPCASPVNSAASALRSQTVLQPTVAKVTQPCF

SEQ ID NO: 48342 - protein, 9 aa, Homo sapiens
PLKSHPVVP

SEQ ID NO: 48343 - protein, 19 aa, Homo sapiens
SPVPASLPLGLWDPARGPG

SEQ ID NO: 48344 - protein, 17 aa, Homo sapiens
CLVTSLAVEGSSPTGSI

SEQ ID NO: 48345 - protein, 30 aa, Homo sapiens; identical to SEQ ID NO: 48339

SEQ ID NO: 48346 - protein, 30 aa, Homo sapiens
TGTSASMQRRWLPCASPVNSAASALRSQTV

SEQ ID NO: 48347 - protein, 4 aa, Homo sapiens
SSST

SEQ ID NO: 48348 - protein, 16 aa, Homo sapiens
RWRAVRAAHTAWTRCP

SEQ ID NO: 48349 - protein, 27 aa, Homo sapiens
APSGSGPRSPALTTSSPRASCGLWSCW

SEQ ID NO: 48350 - protein, 64 aa, Homo sapiens
GNLSAAFTGTRPQPAPEALRLSPGVRATTITTLGRVARVERSPGGAGGMRMSSGRWWWSARTVS

SEQ ID NO: 48351 - protein, 5 aa, Homo sapiens
SRRTM

SEQ ID NO: 48352 - protein, 77 aa, Homo sapiens
AAGSAGRRPSSWRSVMTRQWPRSARRCCVSSQGTPTFQNLGESCARPGAATLTSAAPIHTRRWAPAGRMWRSWPSPC

SEQ ID NO: 48353 - protein, 37 aa, Homo sapiens
APSGSGPRSPALTTSSPRASCGLWSCWRRASLPTSSS

SEQ ID NO: 48354 - protein, 31 aa, Homo sapiens
GNLSAAFTGTRPQPAPEALRLSPGVRATTIT

SEQ ID NO: 48355 - protein, 5 aa, Homo sapiens
SRRTM

SEQ ID NO: 48356 - protein, 36 aa, Homo sapiens
RGSTPVSSGQACPQRRWLPSTAWALAPPTRSFWNSR

SEQ ID NO: 48357 - protein, 34 aa, Homo sapiens
AAGSAGRRPSSWRSVMTRQWPRSARRCCVSSQGT

SEQ ID NO: 48358 - protein, 4 aa, Homo sapiens
SPCR

SEQ ID NO: 48359 - protein, 21 aa, Homo sapiens
VEEFQYCLQNQIGDQSWFLFC

SEQ ID NO: 48360 - protein, 15 aa, Homo sapiens
QLHHQHHLPVVSSAV

SEQ ID NO: 48361 - protein, 21 aa, Homo sapiens
VEEFQYCLQNQIGDQSWFLFC

SEQ ID NO: 48362 - protein, 57 aa, Homo sapiens
QLHHQHHLPVVSSAVTSLLVRRWNVPSIIQNIVGLTLNVQDRTAHSTIPPLMSHHDM

SEQ ID NO: 48363 - protein, 15 aa, Homo sapiens
AEAAVITTLILWGGM

SEQ ID NO: 48364 - protein, 15 aa, Homo sapiens
AQQLLLLWVLRVSLI

SEQ ID NO: 48365 - protein, 8 aa, Homo sapiens
PHLVLHQQ

SEQ ID NO: 48366 - protein, 12 aa, Homo sapiens
LCQHPVLLAAAM

SEQ ID NO: 48367 - protein, 12 aa, Homo sapiens
LQQQQFYQLVNL

SEQ ID NO: 48368 - protein, 6 aa, Homo sapiens
PPASHQ

SEQ ID NO: 48369 - protein, 35 aa, Homo sapiens
MIPILKPTTVKKVLPRKTLTDWCTWVLMHSWPKLR

SEQ ID NO: 48370 - protein, 23 aa, Homo sapiens
ECSEATSSWPPRPLLTTEEACLP

SEQ ID NO: 48371 - protein, 65 aa, Homo sapiens
ECSEATSSWPPRPLLTTEEACLPSCRCRQKTLCPRQPRPLLTPQEPLVPQQTKTWRQRPSMRYWK

SEQ ID NO: 48372 - protein, 4 aa, Homo sapiens
QERW

SEQ ID NO: 48373 - protein, 36 aa, Homo sapiens
KSSSFLGLTSSKWELGQALCVLLGRKLEWGIHSSAQ

SEQ ID NO: 48374 - protein, 27 aa, Homo sapiens
WSVQMLLMASKATSFQMEVAAVLGMWP

SEQ ID NO: 48375 - protein, 36 aa, Homo sapiens
WSVQMLLMASKATSFQMEVAAVLGMWPRLLGQELTS

SEQ ID NO: 48376 - protein, 29 aa, Homo sapiens
CWVACWLGTVSQVVSSSRGMARSTSSSME

SEQ ID NO: 48377 - protein, 41 aa, Homo sapiens
SMRPHSGPRMTTRSCLKTPPMQMAIPLPSMWLRDTWWLVRN

SEQ ID NO: 48378 - protein, 17 aa, Homo sapiens
FPSTYNLPMLPHTATIP

SEQ ID NO: 48379 - protein, 32 aa, Homo sapiens
PCWICLKWRRMVRKKPSERTFITGCFYGMVPG

SEQ ID NO: 48380 - protein, 6 aa, Homo sapiens
VTGWES

SEQ ID NO: 48381 - protein, 20 aa, Homo sapiens
AMGFELPHLKLPSQVTCLGK

SEQ ID NO: 48382 - protein, 79 aa, Homo sapiens
MRTSWPPRGAAWAPSACGAGGRRGGAGAASPRWQWWSWRGCNGRPPSWPTSRSAPALIRGLCSVGMRRATCGSTTSATS

SEQ ID NO: 48383 - protein, 25 aa, Homo sapiens
SSHPCCRQPCRPPHSPALPSLPTRS

SEQ ID NO: 48384 - protein, 11 aa, Homo sapiens
SGPSPGPLARW

SEQ ID NO: 48385 - protein, 4 aa, Homo sapiens
PRPW

SEQ ID NO: 48386 - protein, 72 aa, Homo sapiens
RVYGRNAAALSQALRLEAPELPVKVNPTKPRRGSFEVTLLRPDGSSAELWTGIKKGPPRKLKFPEPQEVVEE

SEQ ID NO: 48387 - protein, 6 aa, Homo sapiens
KHCILL

SEQ ID NO: 48388 - protein, 27 aa, Homo sapiens
KKNLYLNMPLKFQTMLDLDTLLKNFLK

SEQ ID NO: 48389 - protein, 30 aa, Homo sapiens
RRKTANQLNLREFLLCVQFHDPQMKQLPHT

SEQ ID NO: 48390 - protein, 13 aa, Homo sapiens
GNFEIIMSELLLT

SEQ ID NO: 48391 - protein, 10 aa, Homo sapiens
SSTQGRSSKD

SEQ ID NO: 48392 - protein, 9 aa, Homo sapiens
RCVHGKRTS

SEQ ID NO: 48393 - protein, 27 aa, Homo sapiens
MENSTNISNHPPQYLNGERKIMIYDYC

SEQ ID NO: 48394 - protein, 4 aa, Homo sapiens
QMEE

SEQ ID NO: 48395 - protein, 4 aa, Homo sapiens
LKMK

SEQ ID NO: 48396 - protein, 5 aa, Homo sapiens
KRVQE

SEQ ID NO: 48397 - protein, 11 aa, Homo sapiens
REWNMKNLKNH

SEQ ID NO: 48398 - protein, 6 aa, Homo sapiens
MGFLHV

SEQ ID NO: 48399 - protein, 26 aa, Homo sapiens
NQNSGVDHQDILIFLSQKTPDPSALH

SEQ ID NO: 48400 - protein, 9 aa, Homo sapiens
HPTLRRNLM

SEQ ID NO: 48401 - protein, 57 aa, Homo sapiens
GTSFKRARSHLEVKFQLKGNVLPRRAQRKKLFRACCLWQGCTIPRVYKGKYKAQTAV

SEQ ID NO: 48402 - protein, 35 aa, Homo sapiens
RRKTANQLNLREFLLCVQFHDPQMKQLPHTIPEER

SEQ ID NO: 48403 - protein, 13 aa, Homo sapiens
GNFEIIMSELLLT

SEQ ID NO: 48404 - protein, 10 aa, Homo sapiens
SSTQGRSSKD

SEQ ID NO: 48405 - protein, 8 aa, Homo sapiens
RCVHGKRT

SEQ ID NO: 48406 - protein, 4 aa, Homo sapiens
QMEE

SEQ ID NO: 48407 - protein, 31 aa, Homo sapiens
LKMKGSPLQIKVFIQQIVKMKRIKEGQKRQK

SEQ ID NO: 48408 - protein, 5 aa, Homo sapiens
KRVQE

SEQ ID NO: 48409 - protein, 6 aa, Homo sapiens
REWNMK

SEQ ID NO: 48410 - protein, 6 aa, Homo sapiens
MGFLHV

SEQ ID NO: 48411 - protein, 26 aa, Homo sapiens
NQNSGVDHQDILIFLSQKTPDPSALH

SEQ ID NO: 48412 - protein, 19 aa, Homo sapiens
KVSLPLKSLKVQVMKRNKK

SEQ ID NO: 48413 - protein, 9 aa, Homo sapiens
HPTLRRNLM

SEQ ID NO: 48414 - protein, 14 aa, Homo sapiens
GTSFKRARSHLEVK

SEQ ID NO: 48415 - protein, 6 aa, Homo sapiens
ECSNGE

SEQ ID NO: 48416 - protein, 20 aa, Homo sapiens
IHADIPGKNKSRAAFSPGRI

SEQ ID NO: 48417 - protein, 14 aa, Homo sapiens
TVLPCQPGRIPGII

SEQ ID NO: 48418 - protein, 4 aa, Homo sapiens
LLCN

SEQ ID NO: 48419 - protein, 13 aa, Homo sapiens
LLGICSRVQGALL

SEQ ID NO: 48420 - protein, 8 aa, Homo sapiens
NEFSGKTE

SEQ ID NO: 48421 - protein, 6 aa, Homo sapiens
ILGEPR

SEQ ID NO: 48422 - protein, 16 aa, Homo sapiens
HDPQKTDTVRAEESIP

SEQ ID NO: 48423 - protein, 12 aa, Homo sapiens
VCGAPGLLSSDL

SEQ ID NO: 48424 - protein, 6 aa, Homo sapiens
GWKPKI

SEQ ID NO: 48425 - protein, 5 aa, Homo sapiens
SSSTW

SEQ ID NO: 48426 - protein, 6 aa, Homo sapiens
LCFRIS

SEQ ID NO: 48427 - protein, 5 aa, Homo sapiens
SYIYL

SEQ ID NO: 48428 - protein, 12 aa, Homo sapiens
EQRKTPEIFEVA

SEQ ID NO: 48429 - protein, 16 aa, Homo sapiens
SSFAWISGTGYCNFSN

SEQ ID NO: 48430 - protein, 32 aa, Homo sapiens
SNECSGMLKAQVPLFKYKEICTAIYSTSSQSI

SEQ ID NO: 48431 - protein, 11 aa, Homo sapiens
SQRFRIHKKKV

SEQ ID NO: 48432 - protein, 4 aa, Homo sapiens
LLCN

SEQ ID NO: 48433 - protein, 13 aa, Homo sapiens
LLGICSRVQGALL

SEQ ID NO: 48434 - protein, 8 aa, Homo sapiens
NEFSGKTE

SEQ ID NO: 48435 - protein, 20 aa, Homo sapiens
ILGEPRIVRASLSTSSTPIC

SEQ ID NO: 48436 - protein, 16 aa, Homo sapiens
HDPQKTDTVRAEESIP

SEQ ID NO: 48437 - protein, 10 aa, Homo sapiens
VCGAPGLLSS

SEQ ID NO: 48438 - protein, 5 aa, Homo sapiens
SSSTW

SEQ ID NO: 48439 - protein, 6 aa, Homo sapiens
LCFRIS

SEQ ID NO: 48440 - protein, 5 aa, Homo sapiens
SYIYL

SEQ ID NO: 48441 - protein, 34 aa, Homo sapiens
EQRKTPEIFEVATEILGTEASTQASPIKGTDTSY

SEQ ID NO: 48442 - protein, 16 aa, Homo sapiens
SSFAWISGTGYCNFSN

SEQ ID NO: 48443 - protein, 11 aa, Homo sapiens
SQRFRIHKKKV

SEQ ID NO: 48444 - protein, 10 aa, Homo sapiens
EEDGAVYGEL

SEQ ID NO: 48445 - protein, 21 aa, Homo sapiens
THNILGCQDDQKIQGTSVQSH

SEQ ID NO: 48446 - protein, 5 aa, Homo sapiens
VKDLS

SEQ ID NO: 48447 - protein, 17 aa, Homo sapiens
KMPAQPYCRWRRGSTSH

SEQ ID NO: 48448 - protein, 51 aa, Homo sapiens
DTWTSHVKPTITSAPACTRWSSSQMASCASWWSPWRPPSHSSWFTSASSNW

SEQ ID NO: 48449 - protein, 16 aa, Homo sapiens
WISSLLTGRRLVALKM

SEQ ID NO: 48450 - protein, 42 aa, Homo sapiens
NRYFDKQEQALQQFCFWMKLIQSWELAQPARQDVMFKNEFFL

SEQ ID NO: 48451 - protein, 20 aa, Homo sapiens
REEEVNQVNRSFKKFLTEVS

SEQ ID NO: 48452 - protein, 10 aa, Homo sapiens
LLQQQIDLMC

SEQ ID NO: 48453 - protein, 9 aa, Homo sapiens
ILLCYDLED

SEQ ID NO: 48454 - protein, 17 aa, Homo sapiens
IRSSISHLQITRAGFLF

SEQ ID NO: 48455 - protein, 8 aa, Homo sapiens
KSVQKPCQ

SEQ ID NO: 48456 - protein, 7 aa, Homo sapiens
MVLDLRQ

SEQ ID NO: 48457 - protein, 20 aa, Homo sapiens
REEEVNQVNRSFKKFLTEVS

SEQ ID NO: 48458 - protein, 7 aa, Homo sapiens
LLQQQID

SEQ ID NO: 48459 - protein, 17 aa, Homo sapiens
IRSSISHLQITRAGFLF

SEQ ID NO: 48460 - protein, 8 aa, Homo sapiens
KSVQKPCQ

SEQ ID NO: 48461 - protein, 5 aa, Homo sapiens
GLMSP

SEQ ID NO: 48462 - protein, 31 aa, Homo sapiens
KTSQQKPVFFLELILETSAQKLLCWLCKKMD

SEQ ID NO: 48463 - protein, 4 aa, Homo sapiens
TQLQ

SEQ ID NO: 48464 - protein, 66 aa, Homo sapiens
PGMARCRRSVRMLLKTADRPGLRPWLMTGTKSLTEGRKRKLKNLRERRGETSTPSRNFRLDGTSGL

SEQ ID NO: 48465 - protein, 9 aa, Homo sapiens
MALLDICIC

SEQ ID NO: 48466 - protein, 4 aa, Homo sapiens
RPKN

SEQ ID NO: 48467 - protein, 31 aa, Homo sapiens
KLMEGLQHPHSLQIVRKYTPLRGMEKFMFGM

SEQ ID NO: 48468 - protein, 17 aa, Homo sapiens
TQGSALTDLLMKAVYMD

SEQ ID NO: 48469 - protein, 8 aa, Homo sapiens
ALPHLGMD

SEQ ID NO: 48470 - protein, 17 aa, Homo sapiens
TQGSALTDLLMKAVYMD

SEQ ID NO: 48471 - protein, 50 aa, Homo sapiens
ALPHLGMDSMLLVGVTSLTFNPTTEILAIASEKMKEAVRLVHLPSCTVFS

SEQ ID NO: 48472 - protein, 17 aa, Homo sapiens
GRRKKRRKDAASRTSGF

SEQ ID NO: 48473 - protein, 24 aa, Homo sapiens
KGWATPRTRPSRYSTQPAGTWMRP

SEQ ID NO: 48474 - protein, 10 aa, Homo sapiens
QLPRGLWPCP

SEQ ID NO: 48475 - protein, 9 aa, Homo sapiens
AVGPAQSSL

SEQ ID NO: 48476 - protein, 8 aa, Homo sapiens
GSQHPLKM

SEQ ID NO: 48477 - protein, 20 aa, Homo sapiens
LILSQNQMISLTKTSTLCRR

SEQ ID NO: 48478 - protein, 27 aa, Homo sapiens
HLHMVLLALLLKFIDHLQVEMQIVVFI

SEQ ID NO: 48479 - protein, 39 aa, Homo sapiens
TGCNFNSSRIVFMLPSSLICRVVGYMKQDVCVNQRCLTA

SEQ ID NO: 48480 - protein, 7 aa, Homo sapiens
KKRIVRS

SEQ ID NO: 48481 - protein, 14 aa, Homo sapiens
VWRMKTFGRESCLW

SEQ ID NO: 48482 - protein, 5 aa, Homo sapiens
VQLLK

SEQ ID NO: 48483 - protein, 48 aa, Homo sapiens
KNSIMMEKRRKKMMITGLEQEASPAVCLCLQSLKGDLLFHLLNKLTRI

SEQ ID NO: 48484 - protein, 5 aa, Homo sapiens
RLYLK

SEQ ID NO: 48485 - protein, 28 aa, Homo sapiens
QKQLTTLQFHRNRHFQLLPELELLKKNC

SEQ ID NO: 48486 - protein, 12 aa, Homo sapiens
QKWSRDKVGPPE

SEQ ID NO: 48487 - protein, 13 aa, Homo sapiens
VPPLKKRKQKEIL

SEQ ID NO: 48488 - protein, 19 aa, Homo sapiens
KKIKELNRGNYYPDCKSTQ

SEQ ID NO: 48489 - protein, 4 aa, Homo sapiens
WQKL

SEQ ID NO: 48490 - protein, 8 aa, Homo sapiens
RSQSCLRK

SEQ ID NO: 48491 - protein, 8 aa, Homo sapiens
WHQTKSRG

SEQ ID NO: 48492 - protein, 30 aa, Homo sapiens; identical to SEQ ID NO: 11585

SEQ ID NO: 48493 - protein, 11 aa, Homo sapiens
RWMVSPAPQDT

SEQ ID NO: 48494 - protein, 21 aa, Homo sapiens
TKLQPQTRDSEVSSTHSSCTC

SEQ ID NO: 48495 - protein, 15 aa, Homo sapiens
AGSLRTQMVAFLTLR

SEQ ID NO: 48496 - protein, 28 aa, Homo sapiens
VWHRNQKNFWSAASTGLLVKMGMSVPTI

SEQ ID NO: 48497 - protein, 44 aa, Homo sapiens
VEEFQYCLQNQLHHQHHLPVVSSAVTSLLVRRWNVPSIIQNIVG

SEQ ID NO: 48498 - protein, 8 aa, Homo sapiens
GSQHPLKM

SEQ ID NO: 48499 - protein, 29 aa, Homo sapiens
LILSQNQMISLTKTSTLCRRIPYLRKNLQ

SEQ ID NO: 48500 - protein, 27 aa, Homo sapiens
HLHMVLLALLLKFIDHLQVEMQIVVFI

SEQ ID NO: 48501 - protein, 4 aa, Homo sapiens
TGCN

SEQ ID NO: 48502 - protein, 14 aa, Homo sapiens
KKRIVRSLETTRRK

SEQ ID NO: 48503 - protein, 14 aa, Homo sapiens
VWRMKTFGRESCLW

SEQ ID NO: 48504 - protein, 5 aa, Homo sapiens
VQLLK

SEQ ID NO: 48505 - protein, 13 aa, Homo sapiens
KNSIMMEKRRKKM

SEQ ID NO: 48506 - protein, 9 aa, Homo sapiens
RLYLKLKNP

SEQ ID NO: 48507 - protein, 28 aa, Homo sapiens
QKQLTTLQFHRNRHFQLLPELELLKKNC

SEQ ID NO: 48508 - protein, 8 aa, Homo sapiens
QKWSRDKV

SEQ ID NO: 48509 - protein, 13 aa, Homo sapiens
VPPLKKRKQKEIL

SEQ ID NO: 48510 - protein, 19 aa, Homo sapiens
KKIKELNRGNYYPDCKSTQ

SEQ ID NO: 48511 - protein, 6 aa, Homo sapiens
WQKLCR

SEQ ID NO: 48512 - protein, 19 aa, Homo sapiens
VKITMTWNPWSMQTQDHLF

SEQ ID NO: 48513 - protein, 8 aa, Homo sapiens
RSQSCLRK

SEQ ID NO: 48514 - protein, 8 aa, Homo sapiens
WHQTKSRG

SEQ ID NO: 48515 - protein, 23 aa, Homo sapiens
RWMVSPAPQDTCQIKRRTCALKE

SEQ ID NO: 48516 - protein, 21 aa, Homo sapiens
TKLQPQTRDSEVSSTHSSCTC

SEQ ID NO: 48517 - protein, 4 aa, Homo sapiens
AGSL

SEQ ID NO: 48518 - protein, 68 aa, Homo sapiens
VWHRNQKNFWSAASTGLLVKMGMSVPTITPSHPAKPSPIVNLLKNVCLFTQIVNMMQSVLNQIVPSLM

SEQ ID NO: 48519 - protein, 40 aa, Homo sapiens
ARRMTFGTCFIRFSTASKTKLGKITGSSSLSNSRRCSRRG

SEQ ID NO: 48520 - protein, 14 aa, Homo sapiens
DAHPCNVELAPALM

SEQ ID NO: 48521 - protein, 25 aa, Homo sapiens
RIMLLPRSYHRYLLEQGADLLGSRK

SEQ ID NO: 48522 - protein, 25 aa, Homo sapiens
RDSFLHWFLLLILDLVVLMSSRQLI

SEQ ID NO: 48523 - protein, 23 aa, Homo sapiens
KYHPQGPLIQSSWKKSNVLRHLD

SEQ ID NO: 48524 - protein, 9 aa, Homo sapiens
QVLERLVKL

SEQ ID NO: 48525 - protein, 19 aa, Homo sapiens
NQINLGVFGSPHTQSCTEK

SEQ ID NO: 48526 - protein, 16 aa, Homo sapiens
RILIKKRKMEKWVAGL

SEQ ID NO: 48527 - protein, 16 aa, Homo sapiens
SMWSSTLALMNYQRMT

SEQ ID NO: 48528 - protein, 16 aa, Homo sapiens
LALIKVLGKTEIVLSS

SEQ ID NO: 48529 - protein, 14 aa, Homo sapiens
LHIRIFVSMEQSLG

SEQ ID NO: 48530 - protein, 15 aa, Homo sapiens
TRGPFLLFKVVIFLI

SEQ ID NO: 48531 - protein, 17 aa, Homo sapiens
QKNNLRPKQAMDRTLVE

SEQ ID NO: 48532 - protein, 5 aa, Homo sapiens
KMSFS

SEQ ID NO: 48533 - protein, 57 aa, Homo sapiens
LQVTLIQEYPRKMVMNSLSLLFHQMNSLAKKLQQKYYSRLRNHWHWQVGLCQTGVNN

SEQ ID NO: 48534 - protein, 6 aa, Homo sapiens
PANVLF

SEQ ID NO: 48535 - protein, 13 aa, Homo sapiens
YHLKLDSFISHVQ

SEQ ID NO: 48536 - protein, 37 aa, Homo sapiens
YGYRTDVKPLWSEREPQAVLGEMTLESFELVVSSMKE

SEQ ID NO: 48537 - protein, 7 aa, Homo sapiens
KFHVASH

SEQ ID NO: 48538 - protein, 22 aa, Homo sapiens
WNGLRMSCKYMQIGNQFLRLNF

SEQ ID NO: 48539 - protein, 8 aa, Homo sapiens
EKKELAWD

SEQ ID NO: 48540 - protein, 44 aa, Homo sapiens
NLLDIMCRGHVDCSQHHFHRIVMSLKGSRNCFISLEFSWPNAFK

SEQ ID NO: 48541 - protein, 29 aa, Homo sapiens
FMSHEVIETYTVLKVSLKLLQKKVMIHSR

SEQ ID NO: 48542 - protein, 26 aa, Homo sapiens
EALKRIQNQNLFLIPLNQNPQLGLME

SEQ ID NO: 48543 - protein, 7 aa, Homo sapiens
THTEPDF

SEQ ID NO: 48544 - protein, 13 aa, Homo sapiens
KKLKTLLSRGAKF

SEQ ID NO: 48545 - protein, 16 aa, Homo sapiens
ATKVFLKMRRTQNYRN

SEQ ID NO: 48546 - protein, 11 aa, Homo sapiens
RIHQVLGLHLA

SEQ ID NO: 48547 - protein, 17 aa, Homo sapiens
ISSFALPQEYMVLQLWI

SEQ ID NO: 48548 - protein, 10 aa, Homo sapiens
QWIMQKNMWI

SEQ ID NO: 48549 - protein, 29 aa, Homo sapiens
CLTFVCIRVFRNKWKPLEMGLIKFFQWRN

SEQ ID NO: 48550 - protein, 9 aa, Homo sapiens
VPSAMKKSK

SEQ ID NO: 48551 - protein, 24 aa, Homo sapiens
FFVETSHHPGQQRILSITLNLSWV

SEQ ID NO: 48552 - protein, 69 aa, Homo sapiens
GFYVACLLMKGKHSCSLPLVVQLYPQVDWLTCIPGSRLYARLMLLMQAIHQSIHVCITLSCLNILPRRS

SEQ ID NO: 48553 - protein, 44 aa, Homo sapiens
RIMLLPRSYHRYLLEQGADLLGSRKKKSTKLKEDAGEHGMMIMC

SEQ ID NO: 48554 - protein, 22 aa, Homo sapiens
RDSFLHWFLLLILDLVVLMSSR

SEQ ID NO: 48555 - protein, 35 aa, Homo sapiens
QVLERLVKLNYHSPISDQPSFTMYKNCFNCPVMAM

SEQ ID NO: 48556 - protein, 15 aa, Homo sapiens
NQINLGVFGSPHTQS

SEQ ID NO: 48557 - protein, 16 aa, Homo sapiens
RILIKKRKMEKWVAGL

SEQ ID NO: 48558 - protein, 16 aa, Homo sapiens
SMWSSTLALMNYQRMT

SEQ ID NO: 48559 - protein, 16 aa, Homo sapiens
PTCRRMQTLLSCATGN

SEQ ID NO: 48560 - protein, 16 aa, Homo sapiens
LALIKVLGKTEIVLSS

SEQ ID NO: 48561 - protein, 11 aa, Homo sapiens
LHIRIFVSMEQ

SEQ ID NO: 48562 - protein, 17 aa, Homo sapiens
QKNNLRPKQAMDRTLVE

SEQ ID NO: 48563 - protein, 11 aa, Homo sapiens
KMSFSFCVFYI

SEQ ID NO: 48564 - protein, 35 aa, Homo sapiens
LQVTLIQEYPRKMVMNSLSLLFHQMNSLAKKLQQK

SEQ ID NO: 48565 - protein, 6 aa, Homo sapiens
PANVLF

SEQ ID NO: 48566 - protein, 20 aa, Homo sapiens
YHLKLDSFISHVQHLAPQEQ

SEQ ID NO: 48567 - protein, 34 aa, Homo sapiens
YGYRTDVKPLWSEREPQAVLGEMTLESFELVVSS

SEQ ID NO: 48568 - protein, 22 aa, Homo sapiens
WNGLRMSCKYMQIGNQFLRLNF

SEQ ID NO: 48569 - protein, 10 aa, Homo sapiens
EKKELAWDPH

SEQ ID NO: 48570 - protein, 37 aa, Homo sapiens; identical to SEQ ID NO: 11717

SEQ ID NO: 48571 - protein, 13 aa, Homo sapiens
FMSHEVIETYTVL

SEQ ID NO: 48572 - protein, 27 aa, Homo sapiens
EALKRIQNQNLFLIPLNQNPQLGLMEF

SEQ ID NO: 48573 - protein, 6 aa, Homo sapiens
LGKTLN

SEQ ID NO: 48574 - protein, 7 aa, Homo sapiens
THTEPDF

SEQ ID NO: 48575 - protein, 13 aa, Homo sapiens
KKLKTLLSRGAKF

SEQ ID NO: 48576 - protein, 10 aa, Homo sapiens
ATKVFLKMRR

SEQ ID NO: 48577 - protein, 11 aa, Homo sapiens
RIHQVLGLHLA

SEQ ID NO: 48578 - protein, 25 aa, Homo sapiens
ISSFALPQEYMVLQLWISSQVVKMR

SEQ ID NO: 48579 - protein, 10 aa, Homo sapiens
QWIMQKNMWI

SEQ ID NO: 48580 - protein, 21 aa, Homo sapiens
CLTFVCIRVFRNKWKPLEMGL

SEQ ID NO: 48581 - protein, 9 aa, Homo sapiens
VPSAMKKSK

SEQ ID NO: 48582 - protein, 32 aa, Homo sapiens
FFVETSHHPGQQRILSITLNLSWVIHVTALVS

SEQ ID NO: 48583 - protein, 30 aa, Homo sapiens
GFYVACLLMKGKHSCSLPLVVQLYPQVDWL

SEQ ID NO: 48584 - protein, 45 aa, Homo sapiens
LHRNPAWQLKICLSNMSLKEARLCSRHQLQIYLQQDLLVEISLMS

SEQ ID NO: 48585 - protein, 7 aa, Homo sapiens
CLLTEES

SEQ ID NO: 48586 - protein, 18 aa, Homo sapiens
RTLQVIKNKLAKDSLLVL

SEQ ID NO: 48587 - protein, 50 aa, Homo sapiens
KRKRSQKMELRKKRILKDSAKRERCILKINLYHLSPCQNQSILRRCEQKR

SEQ ID NO: 48588 - protein, 18 aa, Homo sapiens
PRVPTARFFMSMTCWLES

SEQ ID NO: 48589 - protein, 5 aa, Homo sapiens
FLCIK

SEQ ID NO: 48590 - protein, 13 aa, Homo sapiens
GALKSPQMGPSCS

SEQ ID NO: 48591 - protein, 9 aa, Homo sapiens
MALLDICIC

SEQ ID NO: 48592 - protein, 4 aa, Homo sapiens
RPKN

SEQ ID NO: 48593 - protein, 9 aa, Homo sapiens
MALLDICIC

SEQ ID NO: 48594 - protein, 4 aa, Homo sapiens
RPKN

SEQ ID NO: 48595 - protein, 31 aa, Homo sapiens; identical to SEQ ID NO: 48467

SEQ ID NO: 48596 - protein, 17 aa, Homo sapiens
TQGSALTDLLMKAVYMD

SEQ ID NO: 48597 - protein, 4 aa, Homo sapiens
ALPH

SEQ ID NO: 48598 - protein, 6 aa, Homo sapiens
GLLKQL

SEQ ID NO: 48599 - protein, 15 aa, Homo sapiens
NNLIGLRKAFQKENN

SEQ ID NO: 48600 - protein, 6 aa, Homo sapiens
SILDNV

SEQ ID NO: 48601 - protein, 9 aa, Homo sapiens
KLETISQNV

SEQ ID NO: 48602 - protein, 52 aa, Homo sapiens
KMEFLILEILSNFYGRRLKSMAKLEISGMLFTLNASRIKSQLFLRNSSLKGI

SEQ ID NO: 48603 - protein, 10 aa, Homo sapiens
NTLPRNTLRR

SEQ ID NO: 48604 - protein, 4 aa, Homo sapiens
LKGT

SEQ ID NO: 48605 - protein, 45 aa, Homo sapiens
IDSAVSWSRLSYITVSGTGRGGGTVPGRPSSSRRWSGSDSSLRDM

SEQ ID NO: 48606 - protein, 4 aa, Homo sapiens
MQVI

SEQ ID NO: 48607 - protein, 9 aa, Homo sapiens
KHLGNGTLI

SEQ ID NO: 48608 - protein, 7 aa, Homo sapiens
RNYQTLK

SEQ ID NO: 48609 - protein, 11 aa, Homo sapiens
EKFALMMQFPR

SEQ ID NO: 48610 - protein, 43 aa, Homo sapiens; identical to SEQ ID NO: 47374

SEQ ID NO: 48611 - protein, 11 aa, Homo sapiens
RVIQDLSMCCL

SEQ ID NO: 48612 - protein, 22 aa, Homo sapiens
IKSRVHLSPWFFLFPHLMTSHS

SEQ ID NO: 48613 - protein, 45 aa, Homo sapiens; identical to SEQ ID NO: 48584

SEQ ID NO: 48614 - protein, 8 aa, Homo sapiens
CLLTCFLS

SEQ ID NO: 48615 - protein, 13 aa, Homo sapiens
GFLLPRQMTTTLI

SEQ ID NO: 48616 - protein, 7 aa, Homo sapiens
MITKEFV

SEQ ID NO: 48617 - protein, 11 aa, Homo sapiens
RVIQDLSMCCL

SEQ ID NO: 48618 - protein, 27 aa, Homo sapiens
IKSRVHLSPWFFLFPHLMTSHSLPPSP

SEQ ID NO: 48619 - protein, 33 aa, Homo sapiens
LHRNPAWQLKICLSNMSLKEARLCSRHQLQIYL

SEQ ID NO: 48620 - protein, 11 aa, Homo sapiens
SSPSIREGSGL

SEQ ID NO: 48621 - protein, 45 aa, Homo sapiens
SSPSIREGSGLQYLQEEDSLWLLLPSANDARKAGLVALQVRVPWV

SEQ ID NO: 48622 - protein, 7 aa, Homo sapiens
RGHSSAL

SEQ ID NO: 48623 - protein, 13 aa, Homo sapiens
SPGEASSGFSTVS

SEQ ID NO: 48624 - protein, 22 aa, Homo sapiens
NTTPRLRRIVYLNLLREEKSSK

SEQ ID NO: 48625 - protein, 41 aa, Homo sapiens
KRLCHSICISALLRVEMAPSLTSPAATVLWKAQNPATTLSS

SEQ ID NO: 48626 - protein, 18 aa, Homo sapiens
DCAGQHSGLAHRDGSAAH

SEQ ID NO: 48627 - protein, 16 aa, Homo sapiens
NKATQGLPAGNFTEPQ

SEQ ID NO: 48628 - protein, 12 aa, Homo sapiens
ALGCSDHRGGTR

SEQ ID NO: 48629 - protein, 16 aa, Homo sapiens
APTVLPGGLRACGKIP

SEQ ID NO: 48630 - protein, 10 aa, Homo sapiens
ETDPPASPRR

SEQ ID NO: 48631 - protein, 27 aa, Homo sapiens
ARPLRQGAGAGRLCSSVGPALARPLCR

SEQ ID NO: 48632 - protein, 12 aa, Homo sapiens
CGLHPPGVGSRL

SEQ ID NO: 48633 - protein, 15 aa, Homo sapiens
PQSGPGVCNVQSSAL

SEQ ID NO: 48634 - protein, 4 aa, Homo sapiens
RRSG

SEQ ID NO: 48635 - protein, 15 aa, Homo sapiens
QRFLPPGSCWLIRCD

SEQ ID NO: 48636 - protein, 27 aa, Homo sapiens
LRLEQHLGLAGGHGGGVGTAPASGTQH

SEQ ID NO: 48637 - protein, 32 aa, Homo sapiens
HPDHRAPDQKAQGAPESCGPPQSHHPLHQSLQ

SEQ ID NO: 48638 - protein, 43 aa, Homo sapiens
QQGEPGPAGSLVADEWALGPSVLSAGGVAGPAAGCPDAVPGFP

SEQ ID NO: 48639 - protein, 12 aa, Homo sapiens
NEPWFASYAGEH

SEQ ID NO: 48640 - protein, 4 aa, Homo sapiens
QKEK

SEQ ID NO: 48641 - protein, 4 aa, Homo sapiens
NCPY

SEQ ID NO: 48642 - protein, 7 aa, Homo sapiens
CRDTSGP

SEQ ID NO: 48643 - protein, 22 aa, Homo sapiens
AVGIPTQSSLFARHVLPTTGEC

SEQ ID NO: 48644 - protein, 40 aa, Homo sapiens
RNRLFRSQRKSPCYWKSAQTSLEGGQSSYQGTGEVIRRVK

SEQ ID NO: 48645 - protein, 10 aa, Homo sapiens
SAGFVFLVFC

SEQ ID NO: 48646 - protein, 16 aa, Homo sapiens
NKATQGLPAGNFTEPQ

SEQ ID NO: 48647 - protein, 13 aa, Homo sapiens
ADNCPRRTADRKE

SEQ ID NO: 48648 - protein, 12 aa, Homo sapiens
ALGCSDHRGGTR

SEQ ID NO: 48649 - protein, 12 aa, Homo sapiens
APTVLPGGLRAC

SEQ ID NO: 48650 - protein, 10 aa, Homo sapiens
ETDPPASPRR

SEQ ID NO: 48651 - protein, 57 aa, Homo sapiens
ARPLRQGAGAGRLCSSVGPALARPLCRQPAFSTAFLQSLPLARSAPPERAVRTRHPG

SEQ ID NO: 48652 - protein, 11 aa, Homo sapiens
CGLHPPGVGSR

SEQ ID NO: 48653 - protein, 4 aa, Homo sapiens
RRSG

SEQ ID NO: 48654 - protein, 15 aa, Homo sapiens
QRFLPPGSCWLIRCD

SEQ ID NO: 48655 - protein, 26 aa, Homo sapiens
PMGASPGPGIEQGVEDEAEPPEVAAV

SEQ ID NO: 48656 - protein, 17 aa, Homo sapiens
LRLEQHLGLAGGHGGGV

SEQ ID NO: 48657 - protein, 33 aa, Homo sapiens
HPDHRAPDQKAQGAPESCGPPQSHHPLHQSLQP

SEQ ID NO: 48658 - protein, 4 aa, Homo sapiens
VHPG

SEQ ID NO: 48659 - protein, 35 aa, Homo sapiens
QQGEPGPAGSLVADEWALGPSVLSAGGVAGPAAGC

SEQ ID NO: 48660 - protein, 12 aa, Homo sapiens
NEPWFASYAGEH

SEQ ID NO: 48661 - protein, 4 aa, Homo sapiens
QKEK

SEQ ID NO: 48662 - protein, 4 aa, Homo sapiens
NCPY

SEQ ID NO: 48663 - protein, 16 aa, Homo sapiens
CRDTSGPSQTAYANKA

SEQ ID NO: 48664 - protein, 22 aa, Homo sapiens
AVGIPTQSSLFARHVLPTTGEC

SEQ ID NO: 48665 - protein, 9 aa, Homo sapiens
RNRLFRSQR

SEQ ID NO: 48666 - protein, 14 aa, Homo sapiens
ASSVPRPGPGACTR

SEQ ID NO: 48667 - protein, 31 aa, Homo sapiens; identical to SEQ ID NO: 12126

SEQ ID NO: 48668 - protein, 9 aa, Homo sapiens
SCRNRWMPS

SEQ ID NO: 48669 - protein, 10 aa, Homo sapiens
APSSTREPSG

SEQ ID NO: 48670 - protein, 14 aa, Homo sapiens
RRAVFSCRPPPSSS

SEQ ID NO: 48671 - protein, 17 aa, Homo sapiens
PPSATRCWNGAWASGAR

SEQ ID NO: 48672 - protein, 7 aa, Homo sapiens
SSTMVWT

SEQ ID NO: 48673 - protein, 19 aa, Homo sapiens
AAWRASPRAVSWATRRSLC

SEQ ID NO: 48674 - protein, 37 aa, Homo sapiens
SSPAPAWSRSWRPEWAGASAAAAMARRPCMALPSGSR

SEQ ID NO: 48675 - protein, 29 aa, Homo sapiens
PSLEGSRRNPWCCPPRLFTRPLTGNRRSS

SEQ ID NO: 48676 - protein, 9 aa, Homo sapiens
SCRNRWMPS

SEQ ID NO: 48677 - protein, 13 aa, Homo sapiens
ASGWATDSCTSPC

SEQ ID NO: 48678 - protein, 10 aa, Homo sapiens
APSSTREPSG

SEQ ID NO: 48679 - protein, 14 aa, Homo sapiens
RRAVFSCRPPPSSS

SEQ ID NO: 48680 - protein, 7 aa, Homo sapiens
SSTMVWT

SEQ ID NO: 48681 - protein, 36 aa, Homo sapiens
AAWRASPRAVSWATRRSLCRDCPARTCWPGRSALLS

SEQ ID NO: 48682 - protein, 24 aa, Homo sapiens
SSPAPAWSRSWRPEWAGASAAAAM

SEQ ID NO: 48683 - protein, 30 aa, Homo sapiens
PSLEGSRRNPWCCPPRLFTRPLTGNRRSST

SEQ ID NO: 48684 - protein, 40 aa, Homo sapiens
TSRCKWSKTRTFQERSRCCPPGTTPVACACCCATKWETRR

SEQ ID NO: 48685 - protein, 51 aa, Homo sapiens
PCAGKRPAHQNPSQILRLAPLWCPKMRREMLSCRRSVCGSQTPAGRTWRSC

SEQ ID NO: 48686 - protein, 6 aa, Homo sapiens
CSPQLG

SEQ ID NO: 48687 - protein, 6 aa, Homo sapiens
NPRASW

SEQ ID NO: 48688 - protein, 5 aa, Homo sapiens
SSPTR

SEQ ID NO: 48689 - protein, 8 aa, Homo sapiens
ASGAGSCQ

SEQ ID NO: 48690 - protein, 51 aa, Homo sapiens
RACGTICRSRPTTARPYPSGTASLWETQPDARPTGPRGGRRKTSPAPIACL

SEQ ID NO: 48691 - protein, 6 aa, Homo sapiens
CSPQLG

SEQ ID NO: 48692 - protein, 6 aa, Homo sapiens
NPRASW

SEQ ID NO: 48693 - protein, 5 aa, Homo sapiens
SSPTR

SEQ ID NO: 48694 - protein, 41 aa, Homo sapiens
ASGAGSCQPRSSRPRWRLWWRSWGSPSRCWWPRTQACTGSR

SEQ ID NO: 48695 - protein, 8 aa, Homo sapiens
RACGTICR

SEQ ID NO: 48696 - protein, 32 aa, Homo sapiens
NGRPAPWIPTIRWPWEGSGLQSRSYEAKSTKK

SEQ ID NO: 48697 - protein, 27 aa, Homo sapiens
IGKPAKAGNFGQNCTALFLASSTLPTK

SEQ ID NO: 48698 - protein, 33 aa, Homo sapiens
DQTVIAKEPQTQTRVWNRKTETPHLSQKIFLSL

SEQ ID NO: 48699 - protein, 33 aa, Homo sapiens
DQTVIAKDPQTQTQVWNLKTATPHLPWKILLSF

SEQ ID NO: 48700 - protein, 21 aa, Homo sapiens
TWPRSRRKSATISSMCLTPLP

SEQ ID NO: 48701 - protein, 13 aa, Homo sapiens
IWLKILALPRPEI

SEQ ID NO: 48702 - protein, 48 aa, Homo sapiens
QTRSERGCKSREIRTVFLKPLQLQSLRPKETQSSSPVIYPHQMPQITW

SEQ ID NO: 48703 - protein, 10 aa, Homo sapiens
PQKKWRMGRN

SEQ ID NO: 48704 - protein, 30 aa, Homo sapiens
NHLFITMAPQKQGMLTLKMASGPQMTSQMT

SEQ ID NO: 48705 - protein, 32 aa, Homo sapiens
IVSAQHQVSFEPSWRCPPSTVMACHGVHPTRN

SEQ ID NO: 48706 - protein, 13 aa, Homo sapiens
NMPSSLVKPVSST

SEQ ID NO: 48707 - protein, 38 aa, Homo sapiens
SRVDHPMNLDLNSRLSSMAESFPQLKLEARKWPSRMQL

SEQ ID NO: 48708 - protein, 14 aa, Homo sapiens
RKPKPRTVENQKNH

SEQ ID NO: 48709 - protein, 9 aa, Homo sapiens
VLPARKWQS

SEQ ID NO: 48710 - protein, 23 aa, Homo sapiens
RPCMGRRPTPWLLITRSGRLASS

SEQ ID NO: 48711 - protein, 50 aa, Homo sapiens
TPTLWVAFWSTPAPMALLLNSSWSTSPDLLTSPSSFTKQKLGVAGSQPSA

SEQ ID NO: 48712 - protein, 25 aa, Homo sapiens
LGRTRRQNAWVSQSSLSLAAPSMTR

SEQ ID NO: 48713 - protein, 7 aa, Homo sapiens
ATGASTL

SEQ ID NO: 48714 - protein, 18 aa, Homo sapiens
LTASSPPCSAARFWPPSL

SEQ ID NO: 48715 - protein, 10 aa, Homo sapiens
KKTLRTWVSS

SEQ ID NO: 48716 - protein, 6 aa, Homo sapiens
KEILSA

SEQ ID NO: 48717 - protein, 11 aa, Homo sapiens
KEKLSMTAMQK

SEQ ID NO: 48718 - protein, 13 aa, Homo sapiens
SPGEASSGFSTVS

SEQ ID NO: 48719 - protein, 22 aa, Homo sapiens
NTTPRLRRIVYLNLLREEKSSK

SEQ ID NO: 48720 - protein, 18 aa, Homo sapiens
KRLCHSICISALLRVEMA

SEQ ID NO: 48721 - protein, 7 aa, Homo sapiens
PVLFAVV

SEQ ID NO: 48722 - protein, 55 aa, Homo sapiens
QEMGVHLRMDYDIPLLSTTPRLAESAYMIPKGNPGRLRRQASTGVWLMAMTWRSW

SEQ ID NO: 48723 - protein, 24 aa, Homo sapiens
DSPMVRPRKLPVTTRRPRTTSKKA

SEQ ID NO: 48724 - protein, 21 aa, Homo sapiens
RIWAMGTGLANPRRKRTFISA

SEQ ID NO: 48725 - protein, 48 aa, Homo sapiens
DQTVIAKEPQTQTRVWNRKTETPHLSQKIFLSLLLQSQLRLGTSTAEW

SEQ ID NO: 48726 - protein, 26 aa, Homo sapiens
DQTVIAKDPQTQTQVWNLKTATPHLP

SEQ ID NO: 48727 - protein, 21 aa, Homo sapiens
TWPRSRRKSATISSMCLTPLP

SEQ ID NO: 48728 - protein, 13 aa, Homo sapiens
IWLKILALPRPEI

SEQ ID NO: 48729 - protein, 20 aa, Homo sapiens
LTWKGRGMSIDKGQPLPYGI

SEQ ID NO: 48730 - protein, 16 aa, Homo sapiens
QTRSERGCKSREIRTV

SEQ ID NO: 48731 - protein, 12 aa, Homo sapiens
PQKKWRMGRNLS

SEQ ID NO: 48732 - protein, 12 aa, Homo sapiens
KTGKRPDQNQQD

SEQ ID NO: 48733 - protein, 24 aa, Homo sapiens
NHLFITMAPQKQGMLTLKMASGPQ

SEQ ID NO: 48734 - protein, 32 aa, Homo sapiens; identical to SEQ ID NO: 48705

SEQ ID NO: 48735 - protein, 4 aa, Homo sapiens
QSAS

SEQ ID NO: 48736 - protein, 7 aa, Homo sapiens
RTPSAGC

SEQ ID NO: 48737 - protein, 13 aa, Homo sapiens
NMPSSLVKPVSST

SEQ ID NO: 48738 - protein, 17 aa, Homo sapiens
SRVDHPMNLDLNSRLSS

SEQ ID NO: 48739 - protein, 56 aa, Homo sapiens
RKPKPRTVENQKNHPTIPQRKNQRRLQSPRPPPLQPHPSFLGRAPSPHCLSVCTNW

SEQ ID NO: 48740 - protein, 16 aa, Homo sapiens
VLPARKWQSRWPQRKP

SEQ ID NO: 48741 - protein, 23 aa, Homo sapiens
RPCMGRRPTPWLLITRSGRLASS

SEQ ID NO: 48742 - protein, 7 aa, Homo sapiens
TPTLWVA

SEQ ID NO: 48743 - protein, 23 aa, Homo sapiens
LGRTRRQNAWVSQSSLSLAAPSM

SEQ ID NO: 48744 - protein, 18 aa, Homo sapiens
LTASSPPCSAARFWPPSL

SEQ ID NO: 48745 - protein, 19 aa, Homo sapiens
KKTLRTWVSSSAWEQGIAV

SEQ ID NO: 48746 - protein, 6 aa, Homo sapiens
KEILSA

SEQ ID NO: 48747 - protein, 11 aa, Homo sapiens
KEKLSMTAMQK

SEQ ID NO: 48748 - protein, 13 aa, Homo sapiens
SPGEASSGFSTVS

SEQ ID NO: 48749 - protein, 60 aa, Homo sapiens
KRLCHSICISALLRVEMAPSLTSPAATVLWKAQNPATTLSSRIPNKESSAPRWRTEKAQS

SEQ ID NO: 48750 - protein, 22 aa, Homo sapiens
PTSCSPFISNLSHWVTFSAKGI

SEQ ID NO: 48751 - protein, 7 aa, Homo sapiens
PVLFAVV

SEQ ID NO: 48752 - protein, 12 aa, Homo sapiens
QEMGVHLRMDYD

SEQ ID NO: 48753 - protein, 15 aa, Homo sapiens
YQLMNTVRPSSSCPP

SEQ ID NO: 48754 - protein, 30 aa, Homo sapiens
IPPKRSTLGKRNLGVTKPQWTPWSWSSMWW

SEQ ID NO: 48755 - protein, 35 aa, Homo sapiens
PTTRSRRVRRSASAWGRWWTSSRRMSQVGGSSALP

SEQ ID NO: 48756 - protein, 12 aa, Homo sapiens
TWREGLWWRSSR

SEQ ID NO: 48757 - protein, 62 aa, Homo sapiens
RRTVGSPCPRSQALAHPPTRVPLTWMVFPGSRTRWAGRRSCSAARGTGGLKAARCPTVTPSR

SEQ ID NO: 48758 - protein, 9 aa, Homo sapiens
GRDPLLAGT

SEQ ID NO: 48759 - protein, 40 aa, Homo sapiens
PFLEASTCRSRPSRPKWRKSITPSPNSRQPSQTASASRQA

SEQ ID NO: 48760 - protein, 29 aa, Homo sapiens
RSRIIRMFTWRALWKSLLEESRCGQHLGS

SEQ ID NO: 48761 - protein, 33 aa, Homo sapiens
YQLMNTVRPSSSCPPTSLSVMRCCSSLRQDLRT

SEQ ID NO: 48762 - protein, 23 aa, Homo sapiens
IPPKRSTLGKRNLGVTKPQWTPW

SEQ ID NO: 48763 - protein, 77 aa, Homo sapiens
PTTRSRRVRRSASAWGRWWTSSRRMSQVGGSSALPRSKAGSLQRASKARMGCRMSFLCSLKKSHGGIGLCPGRWAAA

SEQ ID NO: 48764 - protein, 34 aa, Homo sapiens
TWREGLWWRSSRKTWKAGGRSGTRAKKAGPPPPT

SEQ ID NO: 48765 - protein, 19 aa, Homo sapiens
RRTVGSPCPRSQALAHPPT

SEQ ID NO: 48766 - protein, 9 aa, Homo sapiens
GRDPLLAGT

SEQ ID NO: 48767 - protein, 27 aa, Homo sapiens
PFLEASTCRSRPSRPKWRKSITPSPNS

SEQ ID NO: 48768 - protein, 50 aa, Homo sapiens
KPRKWKRFWMATMRSTRLCPSAQSPPPTSGNRRPRGTASGYPPCPTAPTT

SEQ ID NO: 48769 - protein, 20 aa, Homo sapiens
MPCHAPQPSTGTAWAETRRE

SEQ ID NO: 48770 - protein, 16 aa, Homo sapiens
FSSTFQFLPPQKNTLL

SEQ ID NO: 48771 - protein, 13 aa, Homo sapiens
PCAPHNATVPPRL

SEQ ID NO: 48772 - protein, 5 aa, Homo sapiens
TVVFP

SEQ ID NO: 48773 - protein, 6 aa, Homo sapiens
LPGHCP

SEQ ID NO: 48774 - protein, 21 aa, Homo sapiens
PPWLCLLSPCHVLLTSLAPQV

SEQ ID NO: 48775 - protein, 39 aa, Homo sapiens
MPCHAPQPSTGTAWAETRREPSPFGVDASLHSPSVLIPP

SEQ ID NO: 48776 - protein, 16 aa, Homo sapiens
FSSTFQFLPPQKNTLL

SEQ ID NO: 48777 - protein, 5 aa, Homo sapiens
PCAPH

SEQ ID NO: 48778 - protein, 32 aa, Homo sapiens
AWRSARRAPGAAGRGWKRRRRGESGGCRRRGR

SEQ ID NO: 48779 - protein, 30 aa, Homo sapiens
AACGASWRHSGVPVAQGHWWWRCRCAWWKQ

SEQ ID NO: 48780 - protein, 5 aa, Homo sapiens
PKWRR

SEQ ID NO: 48781 - protein, 57 aa, Homo sapiens
GASGCGTRSLSTACLARCTRVSCGSARRSNGCSPCVCRIHSTTSRWCSTDSRAWTKR

SEQ ID NO: 48782 - protein, 6 aa, Homo sapiens
WAAFWT

SEQ ID NO: 48783 - protein, 4 aa, Homo sapiens
TTQS

SEQ ID NO: 48784 - protein, 7 aa, Homo sapiens
WNSAKRK

SEQ ID NO: 48785 - protein, 43 aa, Homo sapiens
ARCCWWRTTCWRWPRCAPRCVRSGELWRARPGPAAPCSGVLAA

SEQ ID NO: 48786 - protein, 41 aa, Homo sapiens
LARLRPAARRWRQQGACSASYMTSTLSWTGSCAPRRRRAAA

SEQ ID NO: 48787 - protein, 47 aa, Homo sapiens
KRRTRCWRATLRSRRRWTSARKTMLASWRPARRCWPPTAQSWARAWH

SEQ ID NO: 48788 - protein, 29 aa, Homo sapiens
TSGCHTSNLAGINCSACGRRAGRRWSRRT

SEQ ID NO: 48789 - protein, 11 aa, Homo sapiens
NSTVTFSPPWS

SEQ ID NO: 48790 - protein, 15 aa, Homo sapiens
ASKRCRWPCRLQRAC

SEQ ID NO: 48791 - protein, 13 aa, Homo sapiens
GRATSTGSRLRRL

SEQ ID NO: 48792 - protein, 4 aa, Homo sapiens
PGCW

SEQ ID NO: 48793 - protein, 74 aa, Homo sapiens
AWRSARRAPGAAGRGWKRRRRGESGGCRRRGRCTSSALTSTGCWTGFATLTAWQPPVTSATTKLPAAAWRASTA

SEQ ID NO: 48794 - protein, 36 aa, Homo sapiens
AACGASWRHSGVPVAQGHWWWRCRCAWWKQSSCSLR

SEQ ID NO: 48795 - protein, 5 aa, Homo sapiens
PKWRR

SEQ ID NO: 48796 - protein, 29 aa, Homo sapiens
GASGCGTRSLSTACLARCTRVSCGSARRS

SEQ ID NO: 48797 - protein, 6 aa, Homo sapiens
WAAFWT

SEQ ID NO: 48798 - protein, 34 aa, Homo sapiens
TTQSRSWWKEATPVQMRCVPARTTSTAGGTASWS

SEQ ID NO: 48799 - protein, 7 aa, Homo sapiens
WNSAKRK

SEQ ID NO: 48800 - protein, 44 aa, Homo sapiens
RPLCRRWSRARRPFWRRQPCWLSASRRRRRGCTRARRSWAPSGA

SEQ ID NO: 48801 - protein, 34 aa, Homo sapiens
KRRTRCWRATLRSRRRWTSARKTMLASWRPARRC

SEQ ID NO: 48802 - protein, 67 aa, Homo sapiens
TSGCHTSNLAGINCSACGRRAGRRWSRRTSTSSSCGIYARRSWCCVTRRWRCLVRSSRAQWNRWRRP

SEQ ID NO: 48803 - protein, 53 aa, Homo sapiens
TLPRSRAVAGPLSSTKARNWTSTRPPGSGCTSCTRLPRLLMRAQPVKGRRRSC

SEQ ID NO: 48804 - protein, 15 aa, Homo sapiens
WKRRRRTFWQGSQQR

SEQ ID NO: 48805 - protein, 29 aa, Homo sapiens
HPLQPSTSSSRSTWLFLATCCSCWTSTVT

SEQ ID NO: 48806 - protein, 66 aa, Homo sapiens
RCSEPSLVGAGSGTQRLQLPSKRRSTRACSCGACPWWAGTTATHTARRCHLCRTSTHRWTTSCGCR

SEQ ID NO: 48807 - protein, 18 aa, Homo sapiens
CLLPRCCWWSSTRVPLTS

SEQ ID NO: 48808 - protein, 33 aa, Homo sapiens
GSRNPGARSTPTSTSLRSPWPAGRPRTRACVTS

SEQ ID NO: 48809 - protein, 26 aa, Homo sapiens
TLPRSRAVAGPLSSTKARNWTSTRPP

SEQ ID NO: 48810 - protein, 57 aa, Homo sapiens
WKRRRRTFWQGSQQRTRVGDHWGRALQSLPTRRPQPQGSGWTARSGFRSATACWAAA

SEQ ID NO: 48811 - protein, 29 aa, Homo sapiens
HPLQPSTSSSRSTWLFLATCCSCWTSTVT

SEQ ID NO: 48812 - protein, 19 aa, Homo sapiens
HGVRSWVTWGAAGTSTARC

SEQ ID NO: 48813 - protein, 23 aa, Homo sapiens
RCSEPSLVGAGSGTQRLQLPSKR

SEQ ID NO: 48814 - protein, 9 aa, Homo sapiens
CLLPRCCWW

SEQ ID NO: 48815 - protein, 19 aa, Homo sapiens
RPCMGRRPTPWLLITSLKV

SEQ ID NO: 48816 - protein, 10 aa, Homo sapiens
SQSHLITWNP

SEQ ID NO: 48817 - protein, 11 aa, Homo sapiens
CPTRSGRLASS

SEQ ID NO: 48818 - protein, 31 aa, Homo sapiens
TPTLWVAFWSTPAPMALLLNSSWSTSPDLLT

SEQ ID NO: 48819 - protein, 16 aa, Homo sapiens
VLPARKWQSRWPQRKP

SEQ ID NO: 48820 - protein, 19 aa, Homo sapiens
RPCMGRRPTPWLLITSLKV

SEQ ID NO: 48821 - protein, 10 aa, Homo sapiens
SQSHLITWNP

SEQ ID NO: 48822 - protein, 66 aa, Homo sapiens
RCSEPSLVGAGSGTQRLQLPSKRRTSTHRWTTSCGCRAPAMASSPASPCSAPLTILATQAPSPRSH

SEQ ID NO: 48823 - protein, 7 aa, Homo sapiens
PMTSFTR

SEQ ID NO: 48824 - protein, 13 aa, Homo sapiens
CCWWSSTRVPLTS

SEQ ID NO: 48825 - protein, 32 aa, Homo sapiens
GSRNPGARSTPTSTSLRSPWPAGRPRTRACVT

SEQ ID NO: 48826 - protein, 26 aa, Homo sapiens
CLLPSKGPVTMASPWMWRWPTSRTAS

SEQ ID NO: 48827 - protein, 7 aa, Homo sapiens
PMTSFTR

SEQ ID NO: 48828 - protein, 8 aa, Homo sapiens
LFQAHLLQ

SEQ ID NO: 48829 - protein, 5 aa, Homo sapiens
PSKKH

SEQ ID NO: 48830 - protein, 11 aa, Homo sapiens
ILPTLLRMKIS

SEQ ID NO: 48831 - protein, 25 aa, Homo sapiens
FYWSSYFYPWYSLQHTIKEKELNKN

SEQ ID NO: 48832 - protein, 44 aa, Homo sapiens
FYWSSYFYPWYSLQHTIKEKELNKNLLAKDLRVLYRHMNWEVKT

SEQ ID NO: 48833 - protein, 22 aa, Homo sapiens
KSLFLRKIHPLLWKLKWKSLIN

SEQ ID NO: 48834 - protein, 23 aa, Homo sapiens
VELEEQGIREKQLHFSLRMISHY

SEQ ID NO: 48835 - protein, 17 aa, Homo sapiens
EALLMLYSRLGVLYQNT

SEQ ID NO: 48836 - protein, 6 aa, Homo sapiens
KVFRNY

SEQ ID NO: 48837 - protein, 6 aa, Homo sapiens
ANKRKR

SEQ ID NO: 48838 - protein, 16 aa, Homo sapiens
LRNHWKGRALVQLQNV

SEQ ID NO: 48839 - protein, 38 aa, Homo sapiens
NECRPWRTFISFPSHILQMRVLNLSLRRWMTMNMQQST

SEQ ID NO: 48840 - protein, 4 aa, Homo sapiens
RTVK

SEQ ID NO: 48841 - protein, 6 aa, Homo sapiens
GYLWEP

SEQ ID NO: 48842 - protein, 11 aa, Homo sapiens
VNQNGKLQDLR

SEQ ID NO: 48843 - protein, 13 aa, Homo sapiens
GRHGFPPSGQEEH

SEQ ID NO: 48844 - protein, 5 aa, Homo sapiens
KPCFH

SEQ ID NO: 48845 - protein, 8 aa, Homo sapiens
EPCGRGGK

SEQ ID NO: 48846 - protein, 18 aa, Homo sapiens
TGRSAANSGGRRRGGGGR

SEQ ID NO: 48847 - protein, 12 aa, Homo sapiens
GPGVSHTLSDSS

SEQ ID NO: 48848 - protein, 20 aa, Homo sapiens
MSSDGTARRSSGVWKDTIRN

SEQ ID NO: 48849 - protein, 56 aa, Homo sapiens
SACLLPPISPSRSLSPSGASGQDETPRLVWTPSPWSGITTMTSVGTWSLQCPELCP

SEQ ID NO: 48850 - protein, 34 aa, Homo sapiens; identical to SEQ ID NO: 47498

SEQ ID NO: 48851 - protein, 7 aa, Homo sapiens
TPATKAT

SEQ ID NO: 48852 - protein, 9 aa, Homo sapiens
NCWANAVAV

SEQ ID NO: 48853 - protein, 22 aa, Homo sapiens
RRKRRAFLALLTCIVPKPKRLV

SEQ ID NO: 48854 - protein, 11 aa, Homo sapiens
LTDGSFSRPRH

SEQ ID NO: 48855 - protein, 13 aa, Homo sapiens
SRTSRSGSSLTQT

SEQ ID NO: 48856 - protein, 25 aa, Homo sapiens
TASGPGWGTRRRSWNSSSVWNSALT

SEQ ID NO: 48857 - protein, 21 aa, Homo sapiens
MGAGTECALCWRSGGACCRMP

SEQ ID NO: 48858 - protein, 8 aa, Homo sapiens
CSARVSMK

SEQ ID NO: 48859 - protein, 10 aa, Homo sapiens
SMSCWNPNSE

SEQ ID NO: 48860 - protein, 11 aa, Homo sapiens
PLCKTCLANYW

SEQ ID NO: 48861 - protein, 7 aa, Homo sapiens
MLKEQTV

SEQ ID NO: 48862 - protein, 15 aa, Homo sapiens
KPKKKSMLLEIGSNF

SEQ ID NO: 48863 - protein, 15 aa, Homo sapiens
SHRSDNWAKPWMIAV

SEQ ID NO: 48864 - protein, 7 aa, Homo sapiens
TPATKAT

SEQ ID NO: 48865 - protein, 9 aa, Homo sapiens
NCWANAVAV

SEQ ID NO: 48866 - protein, 6 aa, Homo sapiens
RDWSTN

SEQ ID NO: 48867 - protein, 22 aa, Homo sapiens
RRKRRAFLALLTCIVPKPKRLV

SEQ ID NO: 48868 - protein, 11 aa, Homo sapiens
LTDGSFSRPRH

SEQ ID NO: 48869 - protein, 67 aa, Homo sapiens
TASGPGWGTRRRSWNSSSVWNSALTSRPSSSRSKSSRSSRKLWTTAKPSSSPSISAALSSPRLTARR

SEQ ID NO: 48870 - protein, 21 aa, Homo sapiens
MGAGTECALCWRSGGACCRMP

SEQ ID NO: 48871 - protein, 8 aa, Homo sapiens
CSARVSMK

SEQ ID NO: 48872 - protein, 39 aa, Homo sapiens; identical to SEQ ID NO: 47507

SEQ ID NO: 48873 - protein, 11 aa, Homo sapiens
PLCKTCLANYW

SEQ ID NO: 48874 - protein, 7 aa, Homo sapiens
MLKEQTV

SEQ ID NO: 48875 - protein, 16 aa, Homo sapiens
KPKKKSMLLEIGSNFS

SEQ ID NO: 48876 - protein, 13 aa, Homo sapiens
RRSVVISRNWRSY

SEQ ID NO: 48877 - protein, 23 aa, Homo sapiens
TCQVVSRICLPGLLLMNWTPQGL

SEQ ID NO: 48878 - protein, 15 aa, Homo sapiens
KGGPKTWTSSIRSYC

SEQ ID NO: 48879 - protein, 15 aa, Homo sapiens
SPSTWRCIGPSSLLM

SEQ ID NO: 48880 - protein, 13 aa, Homo sapiens
GDAPSPILTRSVP

SEQ ID NO: 48881 - protein, 16 aa, Homo sapiens
TAAALSILPSIYRQRR

SEQ ID NO: 48882 - protein, 11 aa, Homo sapiens
RKTDWISTRAG

SEQ ID NO: 48883 - protein, 79 aa, Homo sapiens
MWPGRIMTVTVVLLCCSTASIWPCLSHSASPSRTCPNFVGRSTRSCVTANSLWECGPVAWVEQSSSPFPVQGAGNQCWG

SEQ ID NO: 48884 - protein, 16 aa, Homo sapiens
TAAALSILPSIYRQRR

SEQ ID NO: 48885 - protein, 16 aa, Homo sapiens
RKTDWISTRAGKVTSK

SEQ ID NO: 48886 - protein, 36 aa, Homo sapiens
MWPGRIMTVTVVLLCCSTASIWPCLSHSASPSRTCP

SEQ ID NO: 48887 - protein, 34 aa, Homo sapiens
TLNLDSDRPYSDGQREITSKDTDQALCLSSSWQT

SEQ ID NO: 48888 - protein, 22 aa, Homo sapiens
ASSSACPREFARGTGDPSSSPC

SEQ ID NO: 48889 - protein, 7 aa, Homo sapiens
CSSEGLG

SEQ ID NO: 48890 - protein, 22 aa, Homo sapiens
ASSSACPREFARGTGDPSSSPC

SEQ ID NO: 48891 - protein, 7 aa, Homo sapiens
CSSEGLG

SEQ ID NO: 48892 - protein, 35 aa, Homo sapiens
LLPPAPSRTHRTEDQLLGSQRSGGHGKAVACNPEV

SEQ ID NO: 48893 - protein, 13 aa, Homo sapiens
EVWFVIWPSRQNT

SEQ ID NO: 48894 - protein, 63 aa, Homo sapiens
DLKVMYKRAIEYLKAVVAEVSNDEQIRMEMRTLDTKKQLHPEKWQDRRDTEESQRRKAEFTTG

SEQ ID NO: 48895 - protein, 52 aa, Homo sapiens
VYSQGRTEIPLGEESRMGREFFRRGARGATPNNIWDAMQMPLSEINLEQGNL

SEQ ID NO: 48896 - protein, 44 aa, Homo sapiens
AALNVSFQTHGTLIEKYKVDPDERIVNPQPCMPGLLQQRDYEPW

SEQ ID NO: 48897 - protein, 73 aa, Homo sapiens
VFEGYCEDIPRQSDARKGSPGNLEKVEKENYPAAGLRDGDRETDSQPSRKGFPPTEQALGGHNTGFMKVDMIA

SEQ ID NO: 48898 - protein, 72 aa, Homo sapiens
LLLRTPFFKTPVKMGRSEASIEAVDAPMDCSVHKDTAEQGGISWECVSKEKKLRETVQVPGVFITKHELECN

SEQ ID NO: 48899 - protein, 33 aa, Homo sapiens
VIILVKQQPTELQSRTHDPSTGQPGGGPPLSFA

SEQ ID NO: 48900 - protein, 27 aa, Homo sapiens
TAICAMSMPDISGLKTHLGHVIALLET

SEQ ID NO: 48901 - protein, 72 aa, Homo sapiens
ASGDRTSDLGKLLTSLTIDESPWSEDKVQSPNCRCQWATMNQSDGSQSSGLNRSPALLDASERGRTVLPLNC

SEQ ID NO: 48902 - protein, 50 aa, Homo sapiens
STCLLERSQWSTDFGENSEEGGPSMERFEGNFVQKEGEPKEGANKATAKE

SEQ ID NO: 48903 - protein, 39 aa, Homo sapiens
VEEHEVDSMKDPAGDGTLKGAEPQYVAIKEGICEEPPIT

SEQ ID NO: 48904 - protein, 70 aa, Homo sapiens
GDDVLTSATQRATRPSPKMVSGHDLVARHKEFKKIAARRGPDKQNNKRVTELELAKDAPIKAAAISWSGH

SEQ ID NO: 48905 - protein, 4 aa, Homo sapiens
LNGS

SEQ ID NO: 48906 - protein, 31 aa, Homo sapiens
VDSALQYGRRTSLSALFITIKVQSPMHRNKD

SEQ ID NO: 48907 - protein, 39 aa, Homo sapiens
VTLAQTIVEYDEESSEASSPVLPKHEKCETKEQSILPIQ

SEQ ID NO: 48908 - protein, 44 aa, Homo sapiens
KREGVDDLSANESNPPHFSSVGSAVYRFPTQFIVTRQVEGELLQ

SEQ ID NO: 48909 - protein, 76 aa, Homo sapiens
NRKKTQEAAVINQPLCDLVAAGKVGKACNNSHSKPNSEIKQVPVRMQQVEPPTQRLVTVLEMESLPKTDLLVNRNL

SEQ ID NO: 48910 - protein, 75 aa, Homo sapiens
ESTISQFSAERGALLPTTVSKFEQSKEADPKGSLVDCYLVQKATKDADNLPYPRGDVRKYMLGTHKERVFSRAIV

SEQ ID NO: 48911 - protein, 33 aa, Homo sapiens
EYTGGPVRKARKVCTISFQGSNELELIPRFCPT

SEQ ID NO: 48912 - protein, 47 aa, Homo sapiens
EFEITARSDIGQRQSLKELRPKEGSKTEWNLIYSRHFNGAKMIVRPT

SEQ ID NO: 48913 - protein, 9 aa, Homo sapiens
MLVLKDCSK

SEQ ID NO: 48914 - protein, 43 aa, Homo sapiens
SKSWRRAGGKGFSPAEKKSKGICVLRLIEKTSPINKLSAFMMM

SEQ ID NO: 48915 - protein, 33 aa, Homo sapiens
APRLYKANAAQKLSMTKDAGAMTSCSIASLTGP

SEQ ID NO: 48916 - protein, 44 aa, Homo sapiens
EGLNEDASVSDESRVTSLKGSEKLSSLMDGQLLTQQLRRELTDQ

SEQ ID NO: 48917 - protein, 8 aa, Homo sapiens
NKLLKPSP

SEQ ID NO: 48918 - protein, 34 aa, Homo sapiens
ELETDVIDGGKSVCCRHERASVDELISGVEELRT

SEQ ID NO: 48919 - protein, 15 aa, Homo sapiens
TTLTTFQVPTHIKLQ

SEQ ID NO: 48920 - protein, 67 aa, Homo sapiens
VYIPWLCRNTSTQGKISDRPEIFSQSGQIRAWQPSEFTDTLELGREDAKRLHRGAERFNKLALSASD

SEQ ID NO: 48921 - protein, 78 aa, Homo sapiens
QAQGLDQRSALHRHEDSAKRQWRFFEGRQAPAILVKNRPTLTGTMMEGYPSFRVITERRKAMDDACKFGCVAQVFGIA

SEQ ID NO: 48922 - protein, 12 aa, Homo sapiens
SCVAGYRWGKVN

SEQ ID NO: 48923 - protein, 58 aa, Homo sapiens
RQDLTALKPQPVSMLAEYANNATSRSKKNVKGVFPQGEDRFLALASEKSEKGHVPKIS

SEQ ID NO: 48924 - protein, 20 aa, Homo sapiens
SEFRLYSSVLQDRSIELGFL

SEQ ID NO: 48925 - protein, 58 aa, Homo sapiens
GHGCADQSQPGIQGSSTDNMHWVEGTGELLEIRKSHGGIPQSKFWYYVAHVLSLTIKA

SEQ ID NO: 48926 - protein, 72 aa, Homo sapiens
SAKPDSTLQVIGISQESRRSPYSTHEQGSGQNTNNLASNYRELDFMDDRSSESKVGQSVPSRGAIMAVFFKE

SEQ ID NO: 48927 - protein, 43 aa, Homo sapiens
HVESGFWCKVNSNENPQEVPNAPSKQTKKHPPVGELSPAVDPP

SEQ ID NO: 48928 - protein, 33 aa, Homo sapiens
ASEIDCGDFSTQLLSTTMSVNRETATADAVAQY

SEQ ID NO: 48929 - protein, 23 aa, Homo sapiens
IDPVKSVKRMKQRGTVPYWRDAQ

SEQ ID NO: 48930 - protein, 77 aa, Homo sapiens
GADFNQVPPFEINRIFIVDNEIPKYPRIIEIDKRGGEAAPEQQNVPQSAGRFTRTVFPGSESFPGRNNIGAILEKCK

SEQ ID NO: 48931 - protein, 31 aa, Homo sapiens
HTHLSRVKDPRKQAMAALRFPSVVLENKRLL

SEQ ID NO: 48932 - protein, 64 aa, Homo sapiens
NKFEERFNIRDKYRSEVSGKGTQGGPKPVTTGCLWAFYEDISLSNSAGLIGCEGATAIESKHWD

SEQ ID NO: 48933 - protein, 59 aa, Homo sapiens
KEQLESTPSLFQEFSGEENAPELTSPDEKGRTANCYEINKKGSQSLPSGSVGKLVAYWR

SEQ ID NO: 48934 - protein, 50 aa, Homo sapiens
ELTTNHMNELSINAGETTSIRRLRMKWYVEIPKAPNKRNKQPPKRLSKKS

SEQ ID NO: 48935 - protein, 45 aa, Homo sapiens
LRVDRPPQRLGNDSRLIFLSRCVTTQEFQDMTLVVQLVAESKQAS

SEQ ID NO: 48936 - protein, 29 aa, Homo sapiens
WQAPEPKAKPPLERAFVRPAILHSELLLC

SEQ ID NO: 48937 - protein, 53 aa, Homo sapiens
YQQHLVEELSVKQKSLDFKSLNLNTLSETRSNMSKPAMYISNLPLLKTARTLW

SEQ ID NO: 48938 - protein, 76 aa, Homo sapiens
QQSYLLDHEPEVAKLVSRIEIAKTGVSLSTHEMSWDNSTHRAYNSDFSELDAGDIQRADDEGPLDRHLPQLELRDL

SEQ ID NO: 48939 - protein, 19 aa, Homo sapiens
DATTEQGSTRTPCEEREFR

SEQ ID NO: 48940 - protein, 5 aa, Homo sapiens
QRKED

SEQ ID NO: 48941 - protein, 25 aa, Homo sapiens
GVILEDTKFANCEYKRYGGFGHLVL

SEQ ID NO: 48942 - protein, 20 aa, Homo sapiens
PWDEDLGGPISAFCPVSWVA

SEQ ID NO: 48943 - protein, 59 aa, Homo sapiens
QSLTEERPQLLGDSFEQPKREGEDESLDQGPSLDNQYDSLLYPPLDTSMPKEGEGVLTM

SEQ ID NO: 48944 - protein, 20 aa, Homo sapiens
GIRKEPVGGHESKDEPRSVP

SEQ ID NO: 48945 - protein, 24 aa, Homo sapiens
TQQQVMDLGPQSLGPGELLGMAAK

SEQ ID NO: 48946 - protein, 63 aa, Homo sapiens
ADIETYSMMVVDTPFALSTSTVLRQRGDIDMEEGCICLLPGRRSVDRSSYERTVFAEVLMKLM

SEQ ID NO: 48947 - protein, 10 aa, Homo sapiens
GLSYFAEVSQ

SEQ ID NO: 48948 - protein, 19 aa, Homo sapiens
TESQQFNKVIPSSKLDPLS

SEQ ID NO: 48949 - protein, 28 aa, Homo sapiens
EMSLLANSEILRRNVCSQVADKFNILVE

SEQ ID NO: 48950 - protein, 75 aa, Homo sapiens
TRKSYGITCGSLKHQSYKNQSLDSYIKGVSYKFRIGGSSSTLETDSLPDCVFRMSSQMRHNVRAPLKSRNSADIN

SEQ ID NO: 48951 - protein, 4 aa, Homo sapiens
IPKG

SEQ ID NO: 48952 - protein, 5 aa, Homo sapiens
RSAQT

SEQ ID NO: 48953 - protein, 47 aa, Homo sapiens
QVMSNMYKRSCFLRAAEAEGLFEDPFLGSQRLRQGEKALFLCRCGYR

SEQ ID NO: 48954 - protein, 50 aa, Homo sapiens
ILFAPLSLVPSIRKMPPIGSPYASILEPALPVFSFRSKKLFVIRTCNDQL

SEQ ID NO: 48955 - protein, 19 aa, Homo sapiens
RRSLRVRAFVPAEFGCEMC

SEQ ID NO: 48956 - protein, 62 aa, Homo sapiens
EMSNDDMHNTTMVHDEILHVTKEGKDKFLGKSIQSIVRGQASASLKESRIPYCPVSKAVDLP

SEQ ID NO: 48957 - protein, 43 aa, Homo sapiens
VLILMKTQVRSYQDKLALFEGLGVVKSQQDRTGIESSEHVQSI

SEQ ID NO: 48958 - protein, 50 aa, Homo sapiens
MSDYLYFLQGRGQETQRERKSPAERSMLILAGHDLAGESRAEMKGTLNGT

SEQ ID NO: 48959 - protein, 79 aa, Homo sapiens
IHKIKYEHQPNLWPDKVEAPQPRLFRYNNNTIELCCTPHPANNLELKSKKHRLLEVDKGRDQSLLGAMEVIQPGKGTLE

SEQ ID NO: 48960 - protein, 66 aa, Homo sapiens
VARPLKSKPKVPANPNVKAPVKSLLLEAPPDSFDELPKTDARLEMLEVGLASKWESEFGFDRPTVK

SEQ ID NO: 48961 - protein, 27 aa, Homo sapiens
IIDKQQGEVSERPYEALLIHVLGQVNA

SEQ ID NO: 48962 - protein, 66 aa, Homo sapiens
WERFQFVTKCQSEMAHERKKRTWKYRSDTSSGMVHTKEGPRRTPSPRPTCFKADMALFFEGVIADQ

SEQ ID NO: 48963 - protein, 37 aa, Homo sapiens
LDEAVYQTNAGQLGANLQQDPRIKQLKENAAVRVWHL

SEQ ID NO: 48964 - protein, 62 aa, Homo sapiens
LISSQRENQETDGSKTRLSNMRLHGFETYNLSVFTCLTDKRIAMAALEDKLDFVFCPTGGHG

SEQ ID NO: 48965 - protein, 29 aa, Homo sapiens
EERPLLNLDFPYLLNQTHSQRSDLHGFKA

SEQ ID NO: 48966 - protein, 70 aa, Homo sapiens
DAQKPKDEDDLNQGSGDKRGQQRQFIAARWHGVWTSVWMKQQLGVFELLSLPEGPASYYEHRKKKADDAE

SEQ ID NO: 48967 - protein, 76 aa, Homo sapiens
PYADSCCHLAYANLARYIQLPGCPLPFVIPNSLHEKLLDASHLGDCKKRGEAPGVQSRNHQAAMPAIKREDTKDAK

SEQ ID NO: 48968 - protein, 24 aa, Homo sapiens
DIVVPRPKFPSHCLPIVQYGYINK

SEQ ID NO: 48969 - protein, 52 aa, Homo sapiens
VLFLSELIAEVFHGLRKSIAQRSPLNNILADTDFQPFLVVESARPEELLSAI

SEQ ID NO: 48970 - protein, 58 aa, Homo sapiens
LSPLLANGEQRFSDSDQIDKCLALLPVACAPKLGYEDSQQNPRVPLKLSPGAKVLAGA

SEQ ID NO: 48971 - protein, 4 aa, Homo sapiens
LYYG

SEQ ID NO: 48972 - protein, 35 aa, Homo sapiens
PGREHEGVKTPQVDKLKPSIYDAWLSGSMSSYKTV

SEQ ID NO: 48973 - protein, 52 aa, Homo sapiens
TSEPSDGSDAKSAPDCFAMVTRLSPDDAQFFGCTSFQQPEPHIRELAQIQVA

SEQ ID NO: 48974 - protein, 75 aa, Homo sapiens
AVIRLKKESKQFDDGEEKQVQQKYGYKEHRMVKLGRLSQAVSAMHSQVGLTVLGPRHLELAYALRMQSWPERKKK

SEQ ID NO: 48975 - protein, 64 aa, Homo sapiens
SFIHVLSSIMYVLEPEGTSMGRPCEFFDVEKCNEESAGELPLAKSAPRKIPSLAAVWITNHRPG

SEQ ID NO: 48976 - protein, 23 aa, Homo sapiens
SRVYELCDIAWLSTQKCLSSQVL

SEQ ID NO: 48977 - protein, 77 aa, Homo sapiens
RNHGWTVPYAEPCENVGWLYLGKICARVAGHDGRMQSHPTRLCHIKDQQESGNLDISDPHMEVSRNSLHQPDEHPSI

SEQ ID NO: 48978 - protein, 20 aa, Homo sapiens
HIYVLQYEEVGIKQNDQINS

SEQ ID NO: 48979 - protein, 29 aa, Homo sapiens
DLCQLEQWLGRDAGAYQPYSAELDSGRRG

SEQ ID NO: 48980 - protein, 5 aa, Homo sapiens
PAAAE

SEQ ID NO: 48981 - protein, 64 aa, Homo sapiens
QKQMNATVKFQLKEFVLPPFRISYCICVPRKKLQNTLTSPDSTMWNNLRATHPVPINYLKLAAQ

SEQ ID NO: 48982 - protein, 79 aa, Homo sapiens
QKNQHTRVYAKQNEKASRTKNDVGVDVMVTMGRAQNEDKGEAVTFTTHQSTSSRTSREATITIVDVLSLSSREPREDAR

SEQ ID NO: 48983 - protein, 64 aa, Homo sapiens
FSLNAKLPQHSSKLKHAQTPLEYIALSSACTQDHDASPLQQPSERTDSIFCPCWTRAQLGSFTT

SEQ ID NO: 48984 - protein, 9 aa, Homo sapiens
LMGPEKLEI

SEQ ID NO: 48985 - protein, 78 aa, Homo sapiens
MDQFSGLSLCSDRPSPLSLSRKSAGQLLRGVSPVLVEGVSKEKTPTKSDNIQGVEAVFTEQLLSLTALPGQSRSGAES

SEQ ID NO: 48986 - protein, 78 aa, Homo sapiens
KKLATQAERPEKNLVPQGLHRHQRCHGRKYMEYLMSRDWPGGISVNNQCRETLSPIPRVLSIALFEDKSDRSPVKKED

SEQ ID NO: 48987 - protein, 33 aa, Homo sapiens
TLRAALGHKVAAKVIEGAGKILCELRLLQKRSM

SEQ ID NO: 48988 - protein, 19 aa, Homo sapiens
SVTAKELGSFAAIRRDPSD

SEQ ID NO: 48989 - protein, 35 aa, Homo sapiens
IKALPSLKQLFPSVTNCCIMNDCVLERSLWASTIL

SEQ ID NO: 48990 - protein, 49 aa, Homo sapiens
EWCKVSPSEKEKTLRQCDVGDGIAQTYASEIRPGNSNLNTPRTTSCFMP

SEQ ID NO: 48991 - protein, 15 aa, Homo sapiens
NGPLSADLGSVFEEL

SEQ ID NO: 48992 - protein, 74 aa, Homo sapiens
GRQKKPTEKRSIGAWNEASEGWGRFKISAGDNKGDNFGVADVREHHGFFQLKGGGDFDPGEPVLSYFWLFVIVL

SEQ ID NO: 48993 - protein, 13 aa, Homo sapiens
SSSYLPSHYNILQ

SEQ ID NO: 48994 - protein, 9 aa, Homo sapiens
DEGLKAVST

SEQ ID NO: 48995 - protein, 62 aa, Homo sapiens
DTQEDLLGLTKFSLYEEAGRGPARARLEQAATRHMQPLRKFVCSYYDHKRQAPMNSFSCVKL

SEQ ID NO: 48996 - protein, 11 aa, Homo sapiens
QGKHHPEKMNS

SEQ ID NO: 48997 - protein, 55 aa, Homo sapiens
RQTEDDSITLVMNYLEHISIETENSEKFKQVDGHGWFDSHDYDPHNFKSCGEHIL

SEQ ID NO: 48998 - protein, 72 aa, Homo sapiens
KGQLGETRVRPLDGKTEGSLLGRKVKGTWNQAWNRSDVPCKDLESAAVREDYQSCPPQKESAGRRPGKPVPL

SEQ ID NO: 48999 - protein, 69 aa, Homo sapiens
HQPDHTEAGTTFAKEHKAQLQPNTNENWKSDAAVIPWQALLASLLQKQPWDDLALVPKEENIGDSSCRR

SEQ ID NO: 49000 - protein, 39 aa, Homo sapiens
NSVVPRSCKAVLLEFHNQMRPPAGMKSASWFQDGSVVFD

SEQ ID NO: 49001 - protein, 7 aa, Homo sapiens
FAEIPHD

SEQ ID NO: 49002 - protein, 28 aa, Homo sapiens
PHKPQRDREEEFEIWIELPREPKGLELP

SEQ ID NO: 49003 - protein, 49 aa, Homo sapiens
REYHPGLACSPGIEEQPLPDDIPADRACLQAEVENDADGDLLVSNGESR

SEQ ID NO: 49004 - protein, 52 aa, Homo sapiens
EEDHDCSQQNVPVELGEVRKLILEPAAQGACDTKDHLEAKCLLNVLTLYMRM

SEQ ID NO: 49005 - protein, 54 aa, Homo sapiens
QENPQSGYEYLTTEWAFSASTLCRNKGFFAWLPGSWDECTFFESEIHEQYVDVR

SEQ ID NO: 49006 - protein, 65 aa, Homo sapiens
ADLFIDYHGHLLAIESVVGGAKLAEKPELEEGPGPQGTLRKTCIKDRHLSPLAPEKPAIERHLGP

SEQ ID NO: 49007 - protein, 11 aa, Homo sapiens
TRLPYQEEDPA

SEQ ID NO: 49008 - protein, 34 aa, Homo sapiens
TASKTGPSLCKVKASNLVPCSDPLGRKVCNKSLA

SEQ ID NO: 49009 - protein, 78 aa, Homo sapiens
QQDSDECGESSAYETGQENRQLKCVPAADLEEEVAHEEHRGNKPVVQQVMKDGGGDSVQCSHWSTGDVLTEPADESDG

SEQ ID NO: 49010 - protein, 14 aa, Homo sapiens
LIVADLRCNPGEKE

SEQ ID NO: 49011 - protein, 31 aa, Homo sapiens
LVRASSGDLGSLWHPLSFAEKVPLSTLEAPK

SEQ ID NO: 49012 - protein, 33 aa, Homo sapiens
NMGSIIDTTSIMRTIPKKNEKFSTWTTLCKMPA

SEQ ID NO: 49013 - protein, 66 aa, Homo sapiens
ILVAGSIEWAFAEFSKKAQTSKCTAGLGICPNCLRSTCTEELIPLSIPKKPNGYKMWVETTKQMSK

SEQ ID NO: 49014 - protein, 57 aa, Homo sapiens
TISGPNYTAEEPKPHSNPCLIRADITACPWVAFIEGRNNKTTNIEEVQIKCRAQTDT

SEQ ID NO: 49015 - protein, 9 aa, Homo sapiens
IPLFLEASI

SEQ ID NO: 49016 - protein, 37 aa, Homo sapiens
KIHLGLTVGGPANRKTSDAFSCNTDSETQHLGNFSRH

SEQ ID NO: 49017 - protein, 15 aa, Homo sapiens
HILPETDQPSHGPPE

SEQ ID NO: 49018 - protein, 40 aa, Homo sapiens
CRKPNSLWENLENPDARHSMTNTPGWKRFPSSFSQGLIPA

SEQ ID NO: 49019 - protein, 67 aa, Homo sapiens
TQWKACEQGSVVFRLEYLGKSKAPTEAESPQECEELSFSHGIPKLSGAQKLKQLPRLQQKLLEAEPP

SEQ ID NO: 49020 - protein, 48 aa, Homo sapiens
KPPTVDVSSEQGLPAGEKGPSFFRQRQSEELAKRVKLIAFDALLGKKD

SEQ ID NO: 49021 - protein, 18 aa, Homo sapiens
VSGYSKGVEEVKCREVIR

SEQ ID NO: 49022 - protein, 41 aa, Homo sapiens
DTTATRRGLWLLFSNKPKLMRSTLCALAGVEQSFSEASNPP

SEQ ID NO: 49023 - protein, 28 aa, Homo sapiens
LGVDLPMVPVSPQSPSTPNTELTQVTAL

SEQ ID NO: 49024 - protein, 12 aa, Homo sapiens
LGVDLPMVPVSP

SEQ ID NO: 49025 - protein, 59 aa, Homo sapiens
ASSPSSRTRRPPGWCWLCCGAPWHRRCCCPPSSGPASATAPTCAQCGSNAWPSCLRRME

SEQ ID NO: 49026 - protein, 20 aa, Homo sapiens
SCCLEGTCSSLLLRESTTYS

SEQ ID NO: 49027 - protein, 14 aa, Homo sapiens
RSWIWQLRQHTPSL

SEQ ID NO: 49028 - protein, 14 aa, Homo sapiens
QTPCTCRCGRTWLS

SEQ ID NO: 49029 - protein, 7 aa, Homo sapiens
SCCLEGT

SEQ ID NO: 49030 - protein, 10 aa, Homo sapiens
SGISRRWQMS

SEQ ID NO: 49031 - protein, 5 aa, Homo sapiens
DDKWT

SEQ ID NO: 49032 - protein, 59 aa, Homo sapiens
RRAGMWSWAPGRTRRPRAAHFLILKRPVSKRTRLPKKVAVTAKNLRSLWRAPTSRTAQK

SEQ ID NO: 49033 - protein, 31 aa, Homo sapiens
DQSGNTGPSRPRRSWPGVPSFATHLSPSSTI

SEQ ID NO: 49034 - protein, 4 aa, Homo sapiens
TCSI

SEQ ID NO: 49035 - protein, 25 aa, Homo sapiens
HWEHRSERESLELSCRVSTWGKRWP

SEQ ID NO: 49036 - protein, 6 aa, Homo sapiens
RISSVM

SEQ ID NO: 49037 - protein, 11 aa, Homo sapiens
QPRPSWTRRPS

SEQ ID NO: 49038 - protein, 5 aa, Homo sapiens
RRCNT

SEQ ID NO: 49039 - protein, 31 aa, Homo sapiens; identical to SEQ ID NO: 49033

SEQ ID NO: 49040 - protein, 29 aa, Homo sapiens
ARNLAPNLHPPHPPAFPPWPGSQDLRAGY

SEQ ID NO: 49041 - protein, 4 aa, Homo sapiens
TCSI

SEQ ID NO: 49042 - protein, 7 aa, Homo sapiens
HWEHRSE

SEQ ID NO: 49043 - protein, 6 aa, Homo sapiens
RISSVM

SEQ ID NO: 49044 - protein, 11 aa, Homo sapiens
QPRPSWTRRPS

SEQ ID NO: 49045 - protein, 13 aa, Homo sapiens
RRCNTRTWCVSWA

SEQ ID NO: 49046 - protein, 12 aa, Homo sapiens
SCTRGCTLSWST

SEQ ID NO: 49047 - protein, 5 aa, Homo sapiens
ARATW

SEQ ID NO: 49048 - protein, 10 aa, Homo sapiens
TFCGPGVEPS

SEQ ID NO: 49049 - protein, 61 aa, Homo sapiens
ITPSARRSSMRRKKARCTTMSQSSSTTWATVSPWWPSWWPLSSFCGSGASGACETSSTGTS

SEQ ID NO: 49050 - protein, 24 aa, Homo sapiens
APRSTRATWCALPHHCGLGHWEAV

SEQ ID NO: 49051 - protein, 45 aa, Homo sapiens
GLYQGRGGDSGQSAPARSSGVLEGHECHGAGAHGHHAPRRPGGGR

SEQ ID NO: 49052 - protein, 76 aa, unidentified
  REGION 1..76: note = Description of Unknown:cds_NC_001449.1_cds_NP_040822.1_1 target sequence
RFDAGAYIFSSDTGQGHLQQKSVRQTVLSEVVLERTELEISYAPRLDQEKEELLRKKLQLNPTPANRSRYQSRRVE

SEQ ID NO: 49053 - protein, 18 aa, unidentified
  REGION 1..18: note = Description of Unknown:cds_NC_001449.1_cds_NP_040822.1_1 target sequence
RFDAGAYIFSSDTGQGHL

SEQ ID NO: 49054 - protein, 77 aa, unidentified
  REGION 1..77: note = Description of Unknown:cds_NZ_WFIY01000004.1_cds_1250 target sequence
PHYTHGGFLGYIISWSYFAAGATVPAIEATAVVTYLSSLFPQLTVNGYLTTYGILLAYGLIFLFFIINYLGVSILGK

SEQ ID NO: 49055 - protein, 19 aa, unidentified
  REGION 1..19: note = Description of Unknown:cds_NZ_WFIY01000004.1_cds_1250 target sequence
PHYTHGGFLGYIISWSYFA

SEQ ID NO: 49056 - protein, 71 aa, unidentified
  REGION 1..71: note = Description of Unknown:cds_NZ_WFIY01000004.1_cds_2305 target sequence
PTSTPAMPEEGVYEVKYSNQRTNVVRLLPNGFQERKLRRLANLSAKLFNEVDYERRQQFFHEEVVDIKGTW

SEQ ID NO: 49057 - protein, 72 aa, unidentified
  REGION 1..72: note = Description of Unknown:cds_NZ_WFIY01000004.1_cds_1266 target sequence
DGYIFARGASDNKGTLIARLLAFSKYKGKLNFNFVFEGEEEIGSIHLNEFIQSRKEELSKSSAVIMEGAGLD

SEQ ID NO: 49058 - protein, 14 aa, unidentified
  REGION 1..14: note = Description of Unknown:cds_NZ_WFIY01000004.1_cds_1266 target sequence
DGYIFARGASDNKG

SEQ ID NO: 49059 - protein, 13 aa, unidentified
  REGION 1..13: note = Description of Unknown:cds_NZ_WFIY01000004.1_cds_2170 target sequence
RKTELTFTIQFMR

SEQ ID NO: 49060 - protein, 4 aa, unidentified
  REGION 1..4: note = Description of Unknown:cds_NZ_WFIY01000004.1_cds_2170 target sequence
SRRD

SEQ ID NO: 49061 - protein, 17 aa, unidentified
  REGION 1..17: note = Description of Unknown:cds_NZ_WFIY01000004.1_cds_2170 target sequence
IRQLIDICILSIHIQFI

SEQ ID NO: 49062 - protein, 4 aa, unidentified
  REGION 1..4: note = Description of Unknown:cds_NZ_WFIY01000004.1_cds_2170 target sequence
IKYM

SEQ ID NO: 49063 - protein, 7 aa, unidentified
  REGION 1..7: note = Description of Unknown:cds_NZ_WFIY01000004.1_cds_2170 target sequence
VKRLKLM

SEQ ID NO: 49064 - protein, 8 aa, unidentified
  REGION 1..8: note = Description of Unknown:cds_NZ_WFIY01000004.1_cds_2170 target sequence
FMICMKIV

SEQ ID NO: 49065 - protein, 11 aa, unidentified
  REGION 1..11: note = Description of Unknown:cds_NZ_WFIY01000004.1_cds_2170 target sequence
HITFPKRWVNR

SEQ ID NO: 49066 - protein, 20 aa, unidentified
  REGION 1..20: note = Description of Unknown:cds_NZ_WFIY01000004.1_cds_2170 target sequence
LNSYMMNHLGILSEGDIGNL

SEQ ID NO: 49067 - protein, 7 aa, unidentified
  REGION 1..7: note = Description of Unknown:cds_NZ_WFIY01000004.1_cds_2170 target sequence
YANVVIS

SEQ ID NO: 49068 - protein, 7 aa, unidentified
  REGION 1..7: note = Description of Unknown:cds_NZ_WFIY01000004.1_cds_2170 target sequence
LVNIMLN

SEQ ID NO: 49069 - protein, 19 aa, unidentified
  REGION 1..19: note = Description of Unknown:cds_NZ_WFIY01000004.1_cds_2170 target sequence
EYLRWVTHLIRISYISIEE

SEQ ID NO: 49070 - protein, 12 aa, unidentified
  REGION 1..12: note = Description of Unknown:cds_NZ_WFIY01000004.1_cds_2170 target sequence
KIRKITRYFLLD

SEQ ID NO: 49071 - protein, 5 aa, unidentified
  REGION 1..5: note = Description of Unknown:cds_NZ_WFIY01000004.1_cds_2170 target sequence
FHKRE

SEQ ID NO: 49072 - protein, 5 aa, unidentified
  REGION 1..5: note = Description of Unknown:cds_NZ_WFIY01000004.1_cds_2170 target sequence
ENYLK

SEQ ID NO: 49073 - protein, 14 aa, unidentified
  REGION 1..14: note = Description of Unknown:cds_NZ_WFIY01000004.1_cds_2170 target sequence
YPCNKVSLFWVETS

SEQ ID NO: 49074 - protein, 5 aa, unidentified
  REGION 1..5: note = Description of Unknown:cds_NZ_WFIY01000004.1_cds_2170 target sequence
NRKGI

SEQ ID NO: 49075 - protein, 5 aa, unidentified
  REGION 1..5: note = Description of Unknown:cds_NZ_WFIY01000004.1_cds_2170 target sequence
NRKGI

SEQ ID NO: 49076 - protein, 4 aa, unidentified
  REGION 1..4: note = Description of Unknown:cds_NZ_WFIY01000004.1_cds_2170 target sequence
GVRN

SEQ ID NO: 49077 - protein, 7 aa, unidentified
  REGION 1..7: note = Description of Unknown:cds_NZ_WFIY01000004.1_cds_2170 target sequence
GGKEILR

SEQ ID NO: 49078 - protein, 32 aa, unidentified
  REGION 1..32: note = Description of Unknown:cds_NZ_WFIY01000004.1_cds_2170 target sequence
SLFMVAKETYDFLSEFISHYSHSRCSQLQVVS

SEQ ID NO: 49079 - protein, 13 aa, unidentified
  REGION 1..13: note = Description of Unknown:cds_NZ_WFIY01000004.1_cds_2170 target sequence
RKTELTFTIQFMR

SEQ ID NO: 49080 - protein, 4 aa, unidentified
  REGION 1..4: note = Description of Unknown:cds_NZ_WFIY01000004.1_cds_2170 target sequence
SRRD

SEQ ID NO: 49081 - protein, 17 aa, unidentified
  REGION 1..17: note = Description of Unknown:cds_NZ_WFIY01000004.1_cds_2170 target sequence
IRQLIDICILSIHIQFI

SEQ ID NO: 49082 - protein, 4 aa, unidentified
  REGION 1..4: note = Description of Unknown:cds_NZ_WFIY01000004.1_cds_2170 target sequence
GGII

SEQ ID NO: 49083 - protein, 4 aa, unidentified
  REGION 1..4: note = Description of Unknown:cds_NZ_WFIY01000004.1_cds_2170 target sequence
IKYM

SEQ ID NO: 49084 - protein, 7 aa, unidentified
  REGION 1..7: note = Description of Unknown:cds_NZ_WFIY01000004.1_cds_2170 target sequence
VKRLKLM

SEQ ID NO: 49085 - protein, 11 aa, unidentified
  REGION 1..11: note = Description of Unknown:cds_NZ_WFIY01000004.1_cds_2170 target sequence
HITFPKRWVNR

SEQ ID NO: 49086 - protein, 20 aa, unidentified
  REGION 1..20: note = Description of Unknown:cds_NZ_WFIY01000004.1_cds_2170 target sequence
LNSYMMNHLGILSEGDIGNL

SEQ ID NO: 49087 - protein, 7 aa, unidentified
  REGION 1..7: note = Description of Unknown:cds_NZ_WFIY01000004.1_cds_2170 target sequence
YANVVIS

SEQ ID NO: 49088 - protein, 29 aa, unidentified
  REGION 1..29: note = Description of Unknown:cds_NZ_WFIY01000004.1_cds_2170 target sequence
IKGYSFYARRNFEGYSFRFQSSSLFVKYR

SEQ ID NO: 49089 - protein, 19 aa, unidentified
  REGION 1..19: note = Description of Unknown:cds_NZ_WFIY01000004.1_cds_2170 target sequence
EYLRWVTHLIRISYISIEE

SEQ ID NO: 49090 - protein, 12 aa, unidentified
  REGION 1..12: note = Description of Unknown:cds_NZ_WFIY01000004.1_cds_2170 target sequence
KIRKITRYFLLD

SEQ ID NO: 49091 - protein, 5 aa, unidentified
  REGION 1..5: note = Description of Unknown:cds_NZ_WFIY01000004.1_cds_2170 target sequence
FHKRE

SEQ ID NO: 49092 - protein, 5 aa, unidentified
  REGION 1..5: note = Description of Unknown:cds_NZ_WFIY01000004.1_cds_2170 target sequence
ENYLK

SEQ ID NO: 49093 - protein, 29 aa, unidentified
  REGION 1..29: note = Description of Unknown:cds_NZ_WFIY01000004.1_cds_2170 target sequence
IVGKFFNERDKRLLIGNHKIEYRGYRPIE

SEQ ID NO: 49094 - protein, 14 aa, unidentified
  REGION 1..14: note = Description of Unknown:cds_NZ_WFIY01000004.1_cds_2170 target sequence
YPCNKVSLFWVETS

SEQ ID NO: 49095 - protein, 5 aa, unidentified
  REGION 1..5: note = Description of Unknown:cds_NZ_WFIY01000004.1_cds_2170 target sequence
NRKGI

SEQ ID NO: 49096 - protein, 4 aa, unidentified
  REGION 1..4: note = Description of Unknown:cds_NZ_WFIY01000004.1_cds_2170 target sequence
GVRN

SEQ ID NO: 49097 - protein, 4 aa, unidentified
  REGION 1..4: note = Description of Unknown:cds_NZ_WFIY01000004.1_cds_2170 target sequence
GGKE

SEQ ID NO: 49098 - protein, 5 aa, unidentified
  REGION 1..5: note = Description of Unknown:cds_NZ_WFIY01000004.1_cds_2129 target sequence
VSKSL

SEQ ID NO: 49099 - protein, 16 aa, unidentified
  REGION 1..16: note = Description of Unknown:cds_NZ_WFIY01000004.1_cds_2129 target sequence
AHCMANTKGKLYCRLR

SEQ ID NO: 49100 - protein, 13 aa, unidentified
  REGION 1..13: note = Description of Unknown:cds_NZ_WFIY01000004.1_cds_2129 target sequence
DCRCWQTANTRLS

SEQ ID NO: 49101 - protein, 13 aa, unidentified
  REGION 1..13: note = Description of Unknown:cds_NZ_WFIY01000004.1_cds_2129 target sequence
KSKGLLSMGDERS

SEQ ID NO: 49102 - protein, 13 aa, unidentified
  REGION 1..13: note = Description of Unknown:cds_NZ_WFIY01000004.1_cds_2129 target sequence
GWQGFPQVVFEKP

SEQ ID NO: 49103 - protein, 5 aa, unidentified
  REGION 1..5: note = Description of Unknown:cds_NZ_WFIY01000004.1_cds_2129 target sequence
VSKSL

SEQ ID NO: 49104 - protein, 8 aa, unidentified
  REGION 1..8: note = Description of Unknown:cds_NZ_WFIY01000004.1_cds_2129 target sequence
AHCMANTK

SEQ ID NO: 49105 - protein, 13 aa, unidentified
  REGION 1..13: note = Description of Unknown:cds_NZ_WFIY01000004.1_cds_2129 target sequence
DCRCWQTANTRLS

SEQ ID NO: 49106 - protein, 13 aa, unidentified
  REGION 1..13: note = Description of Unknown:cds_NZ_WFIY01000004.1_cds_2129 target sequence
KSKGLLSMGDERS

SEQ ID NO: 49107 - protein, 40 aa, unidentified
  REGION 1..40: note = Description of Unknown:cds_NZ_WFIY01000004.1_cds_2129 target sequence
GWQGFPQVVFEKPKVKIEPKGSVAIDVNMSDIVVDKDDSH

SEQ ID NO: 49108 - protein, 52 aa, unidentified
  REGION 1..52: note = Description of Unknown:cds_NZ_WFIY01000004.1_cds_1458 target sequence
KYLEEVRDHQKEIMEVMRRFAEINSRLVRSGEVDNFMAEVESEIRKILKAKT

SEQ ID NO: 49109 - protein, 14 aa, unidentified
  REGION 1..14: note = Description of Unknown:cds_NZ_WFIY01000004.1_cds_1458 target sequence
KYLEEVRDHQKEIM

SEQ ID NO: 49110 - protein, 72 aa, unidentified
  REGION 1..72: note = Description of Unknown:cds_NZ_WFIY01000004.1_cds_1318 target sequence
PSSTPAIPEEGVYEVKYSEKRANVVRLLPNGFQERKLRRLANLSAKLFNEVNYERRQQFFHEGKVDFKGTWN

SEQ ID NO: 49111 - protein, 33 aa, unidentified
  REGION 1..33: note = Description of Unknown:cds_NZ_WFIY01000001.1_cds_2379 target sequence
HSYTCSYPTEQLSALAEIIPTSLMGKSKEHKLP

SEQ ID NO: 49112 - protein, 15 aa, unidentified
  REGION 1..15: note = Description of Unknown:cds_NZ_WFIY01000001.1_cds_2379 target sequence
QNGVKGGIQSSSRSK

SEQ ID NO: 49113 - protein, 8 aa, unidentified
  REGION 1..8: note = Description of Unknown:cds_NZ_WFIY01000001.1_cds_2379 target sequence
LWRRTSSR

SEQ ID NO: 49114 - protein, 15 aa, unidentified
  REGION 1..15: note = Description of Unknown:cds_NZ_WFIY01000001.1_cds_2379 target sequence
RAMIDSAVNTVKDLK

SEQ ID NO: 49115 - protein, 23 aa, unidentified
  REGION 1..23: note = Description of Unknown:cds_NZ_WFIY01000001.1_cds_2379 target sequence
QGKEKRFYGGKAYDTNEVLGVVV

SEQ ID NO: 49116 - protein, 4 aa, unidentified
  REGION 1..4: note = Description of Unknown:cds_NZ_WFIY01000001.1_cds_2379 target sequence
EVGL

SEQ ID NO: 49117 - protein, 10 aa, unidentified
  REGION 1..10: note = Description of Unknown:cds_NZ_WFIY01000001.1_cds_2379 target sequence
TLEGREGLWS

SEQ ID NO: 49118 - protein, 11 aa, unidentified
  REGION 1..11: note = Description of Unknown:cds_NZ_WFIY01000001.1_cds_2379 target sequence
VVESLFSAYFW

SEQ ID NO: 49119 - protein, 12 aa, unidentified
  REGION 1..12: note = Description of Unknown:cds_NZ_WFIY01000001.1_cds_2379 target sequence
VCKGYKFCRSSC

SEQ ID NO: 49120 - protein, 24 aa, unidentified
  REGION 1..24: note = Description of Unknown:cds_NZ_WFIY01000001.1_cds_2379 target sequence
AQVLGLRLDNMANLVVGRAKGVEV

SEQ ID NO: 49121 - protein, 4 aa, unidentified
  REGION 1..4: note = Description of Unknown:cds_NZ_WFIY01000001.1_cds_2379 target sequence
EVGL

SEQ ID NO: 49122 - protein, 10 aa, unidentified
  REGION 1..10: note = Description of Unknown:cds_NZ_WFIY01000001.1_cds_2379 target sequence
TLEGREGLWS

SEQ ID NO: 49123 - protein, 11 aa, unidentified
  REGION 1..11: note = Description of Unknown:cds_NZ_WFIY01000001.1_cds_2379 target sequence
VVESLFSAYFW

SEQ ID NO: 49124 - protein, 12 aa, unidentified
  REGION 1..12: note = Description of Unknown:cds_NZ_WFIY01000001.1_cds_2379 target sequence
VCKGYKFCRSSC

SEQ ID NO: 49125 - protein, 26 aa, unidentified
  REGION 1..26: note = Description of Unknown:cds_NZ_WFIY01000001.1_cds_2379 target sequence
AQVLGLRLDNMANLVVGRAKGVEVRP

SEQ ID NO: 49126 - protein, 33 aa, unidentified; identical to SEQ ID NO: 49111
  REGION 1..33: note = Description of Unknown:cds_NZ_WFIY01000001.1_cds_2379 target sequence

SEQ ID NO: 49127 - protein, 6 aa, unidentified
  REGION 1..6: note = Description of Unknown:cds_NZ_WFIY01000001.1_cds_2379 target sequence
EEDNTL

SEQ ID NO: 49128 - protein, 11 aa, unidentified
  REGION 1..11: note = Description of Unknown:cds_NZ_WFIY01000001.1_cds_2379 target sequence
QNGVKGGIQSS

SEQ ID NO: 49129 - protein, 8 aa, unidentified
  REGION 1..8: note = Description of Unknown:cds_NZ_WFIY01000001.1_cds_2379 target sequence
LWRRTSSR

SEQ ID NO: 49130 - protein, 15 aa, unidentified
  REGION 1..15: note = Description of Unknown:cds_NZ_WFIY01000001.1_cds_2379 target sequence
RAMIDSAVNTVKDLK

SEQ ID NO: 49131 - protein, 38 aa, unidentified
  REGION 1..38: note = Description of Unknown:cds_NZ_WFIY01000001.1_cds_2379 target sequence
QGKEKRFYGGKAYDTNEVLGVVVPPRISDLVILLGVKL

SEQ ID NO: 49132 - protein, 4 aa, unidentified
  REGION 1..4: note = Description of Unknown:cds_NZ_WFIY01000001.1_cds_2379 target sequence
EVGL

SEQ ID NO: 49133 - protein, 4 aa, unidentified
  REGION 1..4: note = Description of Unknown:cds_NZ_WFIY01000001.1_cds_2379 target sequence
TLEG

SEQ ID NO: 49134 - protein, 4 aa, unidentified
  REGION 1..4: note = Description of Unknown:cds_NZ_WFIY01000004.1_cds_2320 target sequence
NLTR

SEQ ID NO: 49135 - protein, 5 aa, unidentified
  REGION 1..5: note = Description of Unknown:cds_NZ_WFIY01000004.1_cds_2320 target sequence
SCWLG

SEQ ID NO: 49136 - protein, 9 aa, unidentified
  REGION 1..9: note = Description of Unknown:cds_NZ_WFIY01000004.1_cds_2320 target sequence
RSLNLMKIV

SEQ ID NO: 49137 - protein, 15 aa, unidentified
  REGION 1..15: note = Description of Unknown:cds_NZ_WFIY01000004.1_cds_2320 target sequence
DFNLMEGLEIKLSFS

SEQ ID NO: 49138 - protein, 8 aa, unidentified
  REGION 1..8: note = Description of Unknown:cds_NZ_WFIY01000004.1_cds_2320 target sequence
TNEGKLKG

SEQ ID NO: 49139 - protein, 13 aa, unidentified
  REGION 1..13: note = Description of Unknown:cds_NZ_WFIY01000004.1_cds_2320 target sequence
RYRGRQGLRHKGR

SEQ ID NO: 49140 - protein, 17 aa, unidentified
  REGION 1..17: note = Description of Unknown:cds_NZ_WFIY01000004.1_cds_2320 target sequence
KLYQLDKIGHGPFDVAK

SEQ ID NO: 49141 - protein, 76 aa, unidentified
  REGION 1..76: note = Description of Unknown:cds_NZ_WFIY01000004.1_cds_2320 target sequence
KLYQLDKIGHGPFDVAKIDCDGCEKIIAPYIKEIPSLLIEWDYNYKDIVSNLTKNGYKVKVEHTLKNLGFIYAKKQ

SEQ ID NO: 49142 - protein, 4 aa, unidentified
  REGION 1..4: note = Description of Unknown:cds_NZ_WFIY01000004.1_cds_2320 target sequence
NLTR

SEQ ID NO: 49143 - protein, 5 aa, unidentified
  REGION 1..5: note = Description of Unknown:cds_NZ_WFIY01000004.1_cds_2320 target sequence
SCWLG

SEQ ID NO: 49144 - protein, 9 aa, unidentified
  REGION 1..9: note = Description of Unknown:cds_NZ_WFIY01000004.1_cds_2320 target sequence
RSLNLMKIV

SEQ ID NO: 49145 - protein, 42 aa, unidentified
  REGION 1..42: note = Description of Unknown:cds_NZ_WFIY01000004.1_cds_2320 target sequence
DFNLMEGLEIKLSFSDYWRIDVRGKRVLDIGAGIGDSPIFHC

SEQ ID NO: 49146 - protein, 8 aa, unidentified
  REGION 1..8: note = Description of Unknown:cds_NZ_WFIY01000004.1_cds_2320 target sequence
TNEGKLKG

SEQ ID NO: 49147 - protein, 13 aa, unidentified
  REGION 1..13: note = Description of Unknown:cds_NZ_WFIY01000004.1_cds_2320 target sequence
RYRGRQGLRHKGR

SEQ ID NO: 49148 - protein, 44 aa, unidentified
  REGION 1..44: note = Description of Unknown:cds_NZ_WFIY01000004.1_cds_2320 target sequence
KLYQLDKIGHGPFDVAKIDCDGCEKIIAPYIKEIPSLLIEWDYN

SEQ ID NO: 49149 - protein, 4 aa, unidentified
  REGION 1..4: note = Description of Unknown:cds_NZ_WFIY01000004.1_cds_17 target sequence
ILKT

SEQ ID NO: 49150 - protein, 4 aa, unidentified
  REGION 1..4: note = Description of Unknown:cds_NZ_WFIY01000004.1_cds_17 target sequence
NTSF

SEQ ID NO: 49151 - protein, 5 aa, unidentified
  REGION 1..5: note = Description of Unknown:cds_NZ_WFIY01000004.1_cds_17 target sequence
GFKTS

SEQ ID NO: 49152 - protein, 17 aa, unidentified
  REGION 1..17: note = Description of Unknown:cds_NZ_WFIY01000004.1_cds_17 target sequence
RWLGVICKLVIYNKIKS

SEQ ID NO: 49153 - protein, 4 aa, unidentified
  REGION 1..4: note = Description of Unknown:cds_NZ_WFIY01000004.1_cds_17 target sequence
ESFH

SEQ ID NO: 49154 - protein, 25 aa, unidentified
  REGION 1..25: note = Description of Unknown:cds_NZ_WFIY01000004.1_cds_17 target sequence
YRYHLFSGKSEGLIKIKSSLRFTIF

SEQ ID NO: 49155 - protein, 10 aa, unidentified
  REGION 1..10: note = Description of Unknown:cds_NZ_WFIY01000004.1_cds_17 target sequence
YSFMMDHLKV

SEQ ID NO: 49156 - protein, 19 aa, unidentified
  REGION 1..19: note = Description of Unknown:cds_NZ_WFIY01000004.1_cds_17 target sequence
SRGKLLRSIERERKCLKLK

SEQ ID NO: 49157 - protein, 43 aa, unidentified
  REGION 1..43: note = Description of Unknown:cds_NZ_WFIY01000004.1_cds_17 target sequence
QRKKRIQEEQKGVKGEVSIYKMKTIFSGKINKDELEKYLEIAM

SEQ ID NO: 49158 - protein, 17 aa, unidentified
  REGION 1..17: note = Description of Unknown:cds_NZ_WFIY01000004.1_cds_17 target sequence
RWLGVICKLVIYNKIKS

SEQ ID NO: 49159 - protein, 4 aa, unidentified
  REGION 1..4: note = Description of Unknown:cds_NZ_WFIY01000004.1_cds_17 target sequence
ESFH

SEQ ID NO: 49160 - protein, 32 aa, unidentified
  REGION 1..32: note = Description of Unknown:cds_NZ_WFIY01000004.1_cds_17 target sequence
YRYHLFSGKSEGLIKIKSSLRFTIFPSKEELL

SEQ ID NO: 49161 - protein, 10 aa, unidentified
  REGION 1..10: note = Description of Unknown:cds_NZ_WFIY01000004.1_cds_17 target sequence
YSFMMDHLKV

SEQ ID NO: 49162 - protein, 5 aa, unidentified
  REGION 1..5: note = Description of Unknown:cds_NZ_WFIY01000004.1_cds_17 target sequence
SRGKL

SEQ ID NO: 49163 - protein, 70 aa, unidentified
  REGION 1..70: note = Description of Unknown:cds_NZ_WFIY01000004.1_cds_17 target sequence
QRKKRIQEEQKGVKGEVSIYKMKTIFSGKINKDELEKYLEIAMVKSVNSTVVVILSDERNIVEIKFKGGE

SEQ ID NO: 49164 - protein, 6 aa, unidentified
  REGION 1..6: note = Description of Unknown:cds_NZ_WFIY01000004.1_cds_2150 target sequence
GNPSSI

SEQ ID NO: 49165 - protein, 18 aa, unidentified
  REGION 1..18: note = Description of Unknown:cds_NZ_WFIY01000004.1_cds_2150 target sequence
GNERGYRIPLSCLREFLE

SEQ ID NO: 49166 - protein, 6 aa, unidentified
  REGION 1..6: note = Description of Unknown:cds_NZ_WFIY01000004.1_cds_2150 target sequence
KVIEKF

SEQ ID NO: 49167 - protein, 41 aa, unidentified
  REGION 1..41: note = Description of Unknown:cds_NZ_WFIY01000004.1_cds_2150 target sequence
ENKGFITRAEEKSVIGEDISQGLRRVSVGRVHRKSRPSPSF

SEQ ID NO: 49168 - protein, 23 aa, unidentified
  REGION 1..23: note = Description of Unknown:cds_NZ_WFIY01000004.1_cds_2150 target sequence
EQNRNTPHTIYMRQGKLCSRHRQ

SEQ ID NO: 49169 - protein, 5 aa, unidentified
  REGION 1..5: note = Description of Unknown:cds_NZ_WFIY01000004.1_cds_2150 target sequence
DCNAF

SEQ ID NO: 49170 - protein, 29 aa, unidentified
  REGION 1..29: note = Description of Unknown:cds_NZ_WFIY01000004.1_cds_2150 target sequence
PINEIRLNEYVIEIRASEDLSKYENEFCS

SEQ ID NO: 49171 - protein, 12 aa, unidentified
  REGION 1..12: note = Description of Unknown:cds_NZ_WFIY01000004.1_cds_2150 target sequence
PVRGKLNNTEAH

SEQ ID NO: 49172 - protein, 5 aa, unidentified
  REGION 1..5: note = Description of Unknown:cds_NZ_WFIY01000004.1_cds_2150 target sequence
DCNAF

SEQ ID NO: 49173 - protein, 29 aa, unidentified
  REGION 1..29: note = Description of Unknown:cds_NZ_WFIY01000004.1_cds_2150 target sequence
PINEIRLNEYVIEIRASEDLSKYENEFCS

SEQ ID NO: 49174 - protein, 31 aa, unidentified
  REGION 1..31: note = Description of Unknown:cds_NZ_WFIY01000004.1_cds_2150 target sequence
PVRGKLNNTEAHGNEYQSIRKMRDPLEDLLR

SEQ ID NO: 49175 - protein, 6 aa, unidentified
  REGION 1..6: note = Description of Unknown:cds_NZ_WFIY01000004.1_cds_2150 target sequence
KVIEKF

SEQ ID NO: 49176 - protein, 41 aa, unidentified; identical to SEQ ID NO: 49167
  REGION 1..41: note = Description of Unknown:cds_NZ_WFIY01000004.1_cds_2150 target sequence

SEQ ID NO: 49177 - protein, 9 aa, unidentified
  REGION 1..9: note = Description of Unknown:cds_NZ_WFIY01000004.1_cds_2150 target sequence
HKENDSLIL

SEQ ID NO: 49178 - protein, 17 aa, unidentified
  REGION 1..17: note = Description of Unknown:cds_NZ_WFIY01000004.1_cds_2150 target sequence
EQNRNTPHTIYMRQGKL

SEQ ID NO: 49179 - protein, 56 aa, unidentified
  REGION 1..56: note = Description of Unknown:cds_NZ_WFIY01000004.1_cds_2084 target sequence
VKALRFTLFWLKENIQNLEEKNTLSKVHEGLYEKLKKEYNLPSKVAEDCYRDALAT

SEQ ID NO: 49180 - protein, 21 aa, unidentified
  REGION 1..21: note = Description of Unknown:cds_NZ_WFIY01000004.1_cds_75 target sequence
PRAGHSISYLLSLLEAPQEIV

SEQ ID NO: 49181 - protein, 33 aa, unidentified
  REGION 1..33: note = Description of Unknown:cds_NZ_WFIY01000004.1_cds_75 target sequence
PRAGHSISYLLSLLEAPQEIVNKAKYLDKLYRD

SEQ ID NO: 49182 - protein, 17 aa, unidentified
  REGION 1..17: note = Description of Unknown:random_neg_ctrl neg_ctrl sequence
DVAIKAHMAECDKIDEL

SEQ ID NO: 49183 - protein, 10 aa, unidentified
  REGION 1..10: note = Description of Unknown:ENSG00000156269 known_neg_ctrl sequence
SGISRRWQMS

SEQ ID NO: 49184 - protein, 5 aa, unidentified
  REGION 1..5: note = Description of Unknown:ENSG00000156269 known_neg_ctrl sequence
DDKWT

SEQ ID NO: 49185 - protein, 59 aa, unidentified; identical to SEQ ID NO: 49032
  REGION 1..59: note = Description of Unknown:ENSG00000156269 known_neg_ctrl sequence

SEQ ID NO: 49186 - protein, 31 aa, unidentified; identical to SEQ ID NO: 49033
  REGION 1..31: note = Description of Unknown:ENSG00000007264 known_neg_ctrl sequence

SEQ ID NO: 49187 - protein, 4 aa, unidentified
  REGION 1..4: note = Description of Unknown:ENSG00000007264 known_neg_ctrl sequence
TCSI

SEQ ID NO: 49188 - protein, 25 aa, unidentified
  REGION 1..25: note = Description of Unknown:ENSG00000007264 known_neg_ctrl sequence
HWEHRSERESLELSCRVSTWGKRWP

SEQ ID NO: 49189 - protein, 6 aa, unidentified
  REGION 1..6: note = Description of Unknown:ENSG00000007264 known_neg_ctrl sequence
RISSVM

SEQ ID NO: 49190 - protein, 11 aa, unidentified
  REGION 1..11: note = Description of Unknown:ENSG00000007264 known_neg_ctrl sequence
QPRPSWTRRPS

SEQ ID NO: 49191 - protein, 5 aa, unidentified
  REGION 1..5: note = Description of Unknown:ENSG00000007264 known_neg_ctrl sequence
RRCNT

SEQ ID NO: 49192 - protein, 31 aa, unidentified; identical to SEQ ID NO: 49033
  REGION 1..31: note = Description of Unknown:ENSG00000007264 known_neg_ctrl sequence

SEQ ID NO: 49193 - protein, 27 aa, unidentified
  REGION 1..27: note = Description of Unknown:ENSG00000007264 known_neg_ctrl sequence
ARNLAPNLHPPHPPAFPPWPGSQDLRA

SEQ ID NO: 49194 - protein, 25 aa, unidentified
  REGION 1..25: note = Description of Unknown:ENSG00000007264 known_neg_ctrl sequence
HWEHRSERESLELSCRVSTWGKRWP

SEQ ID NO: 49195 - protein, 6 aa, unidentified
  REGION 1..6: note = Description of Unknown:ENSG00000007264 known_neg_ctrl sequence
RISSVM

SEQ ID NO: 49196 - protein, 11 aa, unidentified
  REGION 1..11: note = Description of Unknown:ENSG00000007264 known_neg_ctrl sequence
QPRPSWTRRPS

SEQ ID NO: 49197 - protein, 13 aa, unidentified
  REGION 1..13: note = Description of Unknown:ENSG00000007264 known_neg_ctrl sequence
RRCNTRTWCVSWA

SEQ ID NO: 49198 - protein, 12 aa, unidentified
  REGION 1..12: note = Description of Unknown:ENSG00000007264 known_neg_ctrl sequence
SCTRGCTLSWST

SEQ ID NO: 49199 - protein, 5 aa, unidentified
  REGION 1..5: note = Description of Unknown:ENSG00000007264 known_neg_ctrl sequence
ARATW

SEQ ID NO: 49200 - protein, 13 aa, unidentified
  REGION 1..13: note = Description of Unknown:random_neg_ctrl neg_ctrl sequence
EVWFVIWPSRQNT

SEQ ID NO: 49201 - protein, 63 aa, unidentified; identical to SEQ ID NO: 48894
  REGION 1..63: note = Description of Unknown:random_neg_ctrl neg_ctrl sequence

SEQ ID NO: 49202 - protein, 52 aa, unidentified; identical to SEQ ID NO: 48895
  REGION 1..52: note = Description of Unknown:random_neg_ctrl neg_ctrl sequence

SEQ ID NO: 49203 - protein, 44 aa, unidentified; identical to SEQ ID NO: 48896
  REGION 1..44: note = Description of Unknown:random_neg_ctrl neg_ctrl sequence

SEQ ID NO: 49204 - protein, 73 aa, unidentified; identical to SEQ ID NO: 48897
  REGION 1..73: note = Description of Unknown:random_neg_ctrl neg_ctrl sequence

SEQ ID NO: 49205 - protein, 72 aa, unidentified; identical to SEQ ID NO: 48898
  REGION 1..72: note = Description of Unknown:random_neg_ctrl neg_ctrl sequence

SEQ ID NO: 49206 - protein, 33 aa, unidentified; identical to SEQ ID NO: 48899
  REGION 1..33: note = Description of Unknown:random_neg_ctrl neg_ctrl sequence

SEQ ID NO: 49207 - protein, 27 aa, unidentified
  REGION 1..27: note = Description of Unknown:random_neg_ctrl neg_ctrl sequence
TAICAMSMPDISGLKTHLGHVIALLET

SEQ ID NO: 49208 - protein, 72 aa, unidentified; identical to SEQ ID NO: 48901
  REGION 1..72: note = Description of Unknown:random_neg_ctrl neg_ctrl sequence

SEQ ID NO: 49209 - protein, 50 aa, unidentified; identical to SEQ ID NO: 48902
  REGION 1..50: note = Description of Unknown:random_neg_ctrl neg_ctrl sequence

SEQ ID NO: 49210 - protein, 39 aa, unidentified; identical to SEQ ID NO: 48903
  REGION 1..39: note = Description of Unknown:random_neg_ctrl neg_ctrl sequence

SEQ ID NO: 49211 - protein, 70 aa, unidentified; identical to SEQ ID NO: 48904
  REGION 1..70: note = Description of Unknown:random_neg_ctrl neg_ctrl sequence

SEQ ID NO: 49212 - protein, 4 aa, unidentified
  REGION 1..4: note = Description of Unknown:random_neg_ctrl neg_ctrl sequence
LNGS

SEQ ID NO: 49213 - protein, 31 aa, unidentified; identical to SEQ ID NO: 48906
  REGION 1..31: note = Description of Unknown:random_neg_ctrl neg_ctrl sequence

SEQ ID NO: 49214 - protein, 39 aa, unidentified; identical to SEQ ID NO: 48907
  REGION 1..39: note = Description of Unknown:random_neg_ctrl neg_ctrl sequence

SEQ ID NO: 49215 - protein, 44 aa, unidentified; identical to SEQ ID NO: 48908
  REGION 1..44: note = Description of Unknown:random_neg_ctrl neg_ctrl sequence

SEQ ID NO: 49216 - protein, 76 aa, unidentified; identical to SEQ ID NO: 48909
  REGION 1..76: note = Description of Unknown:random_neg_ctrl neg_ctrl sequence

SEQ ID NO: 49217 - protein, 75 aa, unidentified; identical to SEQ ID NO: 48910
  REGION 1..75: note = Description of Unknown:random_neg_ctrl neg_ctrl sequence

SEQ ID NO: 49218 - protein, 33 aa, unidentified; identical to SEQ ID NO: 48911
  REGION 1..33: note = Description of Unknown:random_neg_ctrl neg_ctrl sequence

SEQ ID NO: 49219 - protein, 47 aa, unidentified; identical to SEQ ID NO: 48912
  REGION 1..47: note = Description of Unknown:random_neg_ctrl neg_ctrl sequence

SEQ ID NO: 49220 - protein, 9 aa, unidentified
  REGION 1..9: note = Description of Unknown:random_neg_ctrl neg_ctrl sequence
MLVLKDCSK

SEQ ID NO: 49221 - protein, 43 aa, unidentified; identical to SEQ ID NO: 48914
  REGION 1..43: note = Description of Unknown:random_neg_ctrl neg_ctrl sequence

SEQ ID NO: 49222 - protein, 33 aa, unidentified; identical to SEQ ID NO: 48915
  REGION 1..33: note = Description of Unknown:random_neg_ctrl neg_ctrl sequence

SEQ ID NO: 49223 - protein, 44 aa, unidentified; identical to SEQ ID NO: 48916
  REGION 1..44: note = Description of Unknown:random_neg_ctrl neg_ctrl sequence

SEQ ID NO: 49224 - protein, 8 aa, unidentified
  REGION 1..8: note = Description of Unknown:random_neg_ctrl neg_ctrl sequence
NKLLKPSP

SEQ ID NO: 49225 - protein, 34 aa, unidentified; identical to SEQ ID NO: 48918
  REGION 1..34: note = Description of Unknown:random_neg_ctrl neg_ctrl sequence

SEQ ID NO: 49226 - protein, 15 aa, unidentified
  REGION 1..15: note = Description of Unknown:random_neg_ctrl neg_ctrl sequence
TTLTTFQVPTHIKLQ

SEQ ID NO: 49227 - protein, 67 aa, unidentified; identical to SEQ ID NO: 48920
  REGION 1..67: note = Description of Unknown:random_neg_ctrl neg_ctrl sequence

SEQ ID NO: 49228 - protein, 78 aa, unidentified; identical to SEQ ID NO: 48921
  REGION 1..78: note = Description of Unknown:random_neg_ctrl neg_ctrl sequence

SEQ ID NO: 49229 - protein, 12 aa, unidentified
  REGION 1..12: note = Description of Unknown:random_neg_ctrl neg_ctrl sequence
SCVAGYRWGKVN

SEQ ID NO: 49230 - protein, 58 aa, unidentified; identical to SEQ ID NO: 48923
  REGION 1..58: note = Description of Unknown:random_neg_ctrl neg_ctrl sequence

SEQ ID NO: 49231 - protein, 20 aa, unidentified
  REGION 1..20: note = Description of Unknown:random_neg_ctrl neg_ctrl sequence
SEFRLYSSVLQDRSIELGFL

SEQ ID NO: 49232 - protein, 58 aa, unidentified; identical to SEQ ID NO: 48925
  REGION 1..58: note = Description of Unknown:random_neg_ctrl neg_ctrl sequence

SEQ ID NO: 49233 - protein, 72 aa, unidentified; identical to SEQ ID NO: 48926
  REGION 1..72: note = Description of Unknown:random_neg_ctrl neg_ctrl sequence

SEQ ID NO: 49234 - protein, 43 aa, unidentified; identical to SEQ ID NO: 48927
  REGION 1..43: note = Description of Unknown:random_neg_ctrl neg_ctrl sequence

SEQ ID NO: 49235 - protein, 33 aa, unidentified; identical to SEQ ID NO: 48928
  REGION 1..33: note = Description of Unknown:random_neg_ctrl neg_ctrl sequence

SEQ ID NO: 49236 - protein, 23 aa, unidentified
  REGION 1..23: note = Description of Unknown:random_neg_ctrl neg_ctrl sequence
IDPVKSVKRMKQRGTVPYWRDAQ

SEQ ID NO: 49237 - protein, 77 aa, unidentified; identical to SEQ ID NO: 48930
  REGION 1..77: note = Description of Unknown:random_neg_ctrl neg_ctrl sequence

SEQ ID NO: 49238 - protein, 31 aa, unidentified; identical to SEQ ID NO: 48931
  REGION 1..31: note = Description of Unknown:random_neg_ctrl neg_ctrl sequence

SEQ ID NO: 49239 - protein, 64 aa, unidentified; identical to SEQ ID NO: 48932
  REGION 1..64: note = Description of Unknown:random_neg_ctrl neg_ctrl sequence

SEQ ID NO: 49240 - protein, 59 aa, unidentified; identical to SEQ ID NO: 48933
  REGION 1..59: note = Description of Unknown:random_neg_ctrl neg_ctrl sequence

SEQ ID NO: 49241 - protein, 50 aa, unidentified; identical to SEQ ID NO: 48934
  REGION 1..50: note = Description of Unknown:random_neg_ctrl neg_ctrl sequence

SEQ ID NO: 49242 - protein, 45 aa, unidentified; identical to SEQ ID NO: 48935
  REGION 1..45: note = Description of Unknown:random_neg_ctrl neg_ctrl sequence

SEQ ID NO: 49243 - protein, 29 aa, unidentified
  REGION 1..29: note = Description of Unknown:random_neg_ctrl neg_ctrl sequence
WQAPEPKAKPPLERAFVRPAILHSELLLC

SEQ ID NO: 49244 - protein, 53 aa, unidentified; identical to SEQ ID NO: 48937
  REGION 1..53: note = Description of Unknown:random_neg_ctrl neg_ctrl sequence

SEQ ID NO: 49245 - protein, 76 aa, unidentified; identical to SEQ ID NO: 48938
  REGION 1..76: note = Description of Unknown:random_neg_ctrl neg_ctrl sequence

SEQ ID NO: 49246 - protein, 19 aa, unidentified
  REGION 1..19: note = Description of Unknown:random_neg_ctrl neg_ctrl sequence
DATTEQGSTRTPCEEREFR

SEQ ID NO: 49247 - protein, 5 aa, unidentified
  REGION 1..5: note = Description of Unknown:random_neg_ctrl neg_ctrl sequence
QRKED

SEQ ID NO: 49248 - protein, 25 aa, unidentified
  REGION 1..25: note = Description of Unknown:random_neg_ctrl neg_ctrl sequence
GVILEDTKFANCEYKRYGGFGHLVL

SEQ ID NO: 49249 - protein, 20 aa, unidentified
  REGION 1..20: note = Description of Unknown:random_neg_ctrl neg_ctrl sequence
PWDEDLGGPISAFCPVSWVA

SEQ ID NO: 49250 - protein, 59 aa, unidentified; identical to SEQ ID NO: 48943
  REGION 1..59: note = Description of Unknown:random_neg_ctrl neg_ctrl sequence

SEQ ID NO: 49251 - protein, 20 aa, unidentified
  REGION 1..20: note = Description of Unknown:random_neg_ctrl neg_ctrl sequence
GIRKEPVGGHESKDEPRSVP

SEQ ID NO: 49252 - protein, 24 aa, unidentified
  REGION 1..24: note = Description of Unknown:random_neg_ctrl neg_ctrl sequence
TQQQVMDLGPQSLGPGELLGMAAK

SEQ ID NO: 49253 - protein, 63 aa, unidentified; identical to SEQ ID NO: 48946
  REGION 1..63: note = Description of Unknown:random_neg_ctrl neg_ctrl sequence

SEQ ID NO: 49254 - protein, 10 aa, unidentified
  REGION 1..10: note = Description of Unknown:random_neg_ctrl neg_ctrl sequence
GLSYFAEVSQ

SEQ ID NO: 49255 - protein, 19 aa, unidentified
  REGION 1..19: note = Description of Unknown:random_neg_ctrl neg_ctrl sequence
TESQQFNKVIPSSKLDPLS

SEQ ID NO: 49256 - protein, 28 aa, unidentified
  REGION 1..28: note = Description of Unknown:random_neg_ctrl neg_ctrl sequence
EMSLLANSEILRRNVCSQVADKFNILVE

SEQ ID NO: 49257 - protein, 75 aa, unidentified; identical to SEQ ID NO: 48950
  REGION 1..75: note = Description of Unknown:random_neg_ctrl neg_ctrl sequence

SEQ ID NO: 49258 - protein, 4 aa, unidentified
  REGION 1..4: note = Description of Unknown:random_neg_ctrl neg_ctrl sequence
IPKG

SEQ ID NO: 49259 - protein, 5 aa, unidentified
  REGION 1..5: note = Description of Unknown:random_neg_ctrl neg_ctrl sequence
RSAQT

SEQ ID NO: 49260 - protein, 47 aa, unidentified; identical to SEQ ID NO: 48953
  REGION 1..47: note = Description of Unknown:random_neg_ctrl neg_ctrl sequence

SEQ ID NO: 49261 - protein, 50 aa, unidentified; identical to SEQ ID NO: 48954
  REGION 1..50: note = Description of Unknown:random_neg_ctrl neg_ctrl sequence

SEQ ID NO: 49262 - protein, 19 aa, unidentified
  REGION 1..19: note = Description of Unknown:random_neg_ctrl neg_ctrl sequence
RRSLRVRAFVPAEFGCEMC

SEQ ID NO: 49263 - protein, 62 aa, unidentified; identical to SEQ ID NO: 48956
  REGION 1..62: note = Description of Unknown:random_neg_ctrl neg_ctrl sequence

SEQ ID NO: 49264 - protein, 43 aa, unidentified; identical to SEQ ID NO: 48957
  REGION 1..43: note = Description of Unknown:random_neg_ctrl neg_ctrl sequence

SEQ ID NO: 49265 - protein, 50 aa, unidentified; identical to SEQ ID NO: 48958
  REGION 1..50: note = Description of Unknown:random_neg_ctrl neg_ctrl sequence

SEQ ID NO: 49266 - protein, 79 aa, unidentified; identical to SEQ ID NO: 48959
  REGION 1..79: note = Description of Unknown:random_neg_ctrl neg_ctrl sequence

SEQ ID NO: 49267 - protein, 66 aa, unidentified; identical to SEQ ID NO: 48960
  REGION 1..66: note = Description of Unknown:random_neg_ctrl neg_ctrl sequence

SEQ ID NO: 49268 - protein, 27 aa, unidentified
  REGION 1..27: note = Description of Unknown:random_neg_ctrl neg_ctrl sequence
IIDKQQGEVSERPYEALLIHVLGQVNA

SEQ ID NO: 49269 - protein, 66 aa, unidentified; identical to SEQ ID NO: 48962
  REGION 1..66: note = Description of Unknown:random_neg_ctrl neg_ctrl sequence

SEQ ID NO: 49270 - protein, 37 aa, unidentified; identical to SEQ ID NO: 48963
  REGION 1..37: note = Description of Unknown:random_neg_ctrl neg_ctrl sequence

SEQ ID NO: 49271 - protein, 62 aa, unidentified; identical to SEQ ID NO: 48964
  REGION 1..62: note = Description of Unknown:random_neg_ctrl neg_ctrl sequence

SEQ ID NO: 49272 - protein, 29 aa, unidentified
  REGION 1..29: note = Description of Unknown:random_neg_ctrl neg_ctrl sequence
EERPLLNLDFPYLLNQTHSQRSDLHGFKA

SEQ ID NO: 49273 - protein, 70 aa, unidentified; identical to SEQ ID NO: 48966
  REGION 1..70: note = Description of Unknown:random_neg_ctrl neg_ctrl sequence

SEQ ID NO: 49274 - protein, 76 aa, unidentified; identical to SEQ ID NO: 48967
  REGION 1..76: note = Description of Unknown:random_neg_ctrl neg_ctrl sequence

SEQ ID NO: 49275 - protein, 24 aa, unidentified
  REGION 1..24: note = Description of Unknown:random_neg_ctrl neg_ctrl sequence
DIVVPRPKFPSHCLPIVQYGYINK

SEQ ID NO: 49276 - protein, 52 aa, unidentified; identical to SEQ ID NO: 48969
  REGION 1..52: note = Description of Unknown:random_neg_ctrl neg_ctrl sequence

SEQ ID NO: 49277 - protein, 58 aa, unidentified; identical to SEQ ID NO: 48970
  REGION 1..58: note = Description of Unknown:random_neg_ctrl neg_ctrl sequence

SEQ ID NO: 49278 - protein, 4 aa, unidentified
  REGION 1..4: note = Description of Unknown:random_neg_ctrl neg_ctrl sequence
LYYG

SEQ ID NO: 49279 - protein, 35 aa, unidentified; identical to SEQ ID NO: 48972
  REGION 1..35: note = Description of Unknown:random_neg_ctrl neg_ctrl sequence

SEQ ID NO: 49280 - protein, 52 aa, unidentified; identical to SEQ ID NO: 48973
  REGION 1..52: note = Description of Unknown:random_neg_ctrl neg_ctrl sequence

SEQ ID NO: 49281 - protein, 75 aa, unidentified; identical to SEQ ID NO: 48974
  REGION 1..75: note = Description of Unknown:random_neg_ctrl neg_ctrl sequence

SEQ ID NO: 49282 - protein, 64 aa, unidentified; identical to SEQ ID NO: 48975
  REGION 1..64: note = Description of Unknown:random_neg_ctrl neg_ctrl sequence

SEQ ID NO: 49283 - protein, 23 aa, unidentified
  REGION 1..23: note = Description of Unknown:random_neg_ctrl neg_ctrl sequence
SRVYELCDIAWLSTQKCLSSQVL

SEQ ID NO: 49284 - protein, 77 aa, unidentified; identical to SEQ ID NO: 48977
  REGION 1..77: note = Description of Unknown:random_neg_ctrl neg_ctrl sequence

SEQ ID NO: 49285 - protein, 20 aa, unidentified
  REGION 1..20: note = Description of Unknown:random_neg_ctrl neg_ctrl sequence
HIYVLQYEEVGIKQNDQINS

SEQ ID NO: 49286 - protein, 29 aa, unidentified
  REGION 1..29: note = Description of Unknown:random_neg_ctrl neg_ctrl sequence
DLCQLEQWLGRDAGAYQPYSAELDSGRRG

SEQ ID NO: 49287 - protein, 5 aa, unidentified
  REGION 1..5: note = Description of Unknown:random_neg_ctrl neg_ctrl sequence
PAAAE

SEQ ID NO: 49288 - protein, 64 aa, unidentified; identical to SEQ ID NO: 48981
  REGION 1..64: note = Description of Unknown:random_neg_ctrl neg_ctrl sequence

SEQ ID NO: 49289 - protein, 79 aa, unidentified; identical to SEQ ID NO: 48982
  REGION 1..79: note = Description of Unknown:random_neg_ctrl neg_ctrl sequence

SEQ ID NO: 49290 - protein, 64 aa, unidentified; identical to SEQ ID NO: 48983
  REGION 1..64: note = Description of Unknown:random_neg_ctrl neg_ctrl sequence

SEQ ID NO: 49291 - protein, 9 aa, unidentified
  REGION 1..9: note = Description of Unknown:random_neg_ctrl neg_ctrl sequence
LMGPEKLEI

SEQ ID NO: 49292 - protein, 78 aa, unidentified; identical to SEQ ID NO: 48985
  REGION 1..78: note = Description of Unknown:random_neg_ctrl neg_ctrl sequence

SEQ ID NO: 49293 - protein, 78 aa, unidentified; identical to SEQ ID NO: 48986
  REGION 1..78: note = Description of Unknown:random_neg_ctrl neg_ctrl sequence

SEQ ID NO: 49294 - protein, 33 aa, unidentified; identical to SEQ ID NO: 48987
  REGION 1..33: note = Description of Unknown:random_neg_ctrl neg_ctrl sequence

SEQ ID NO: 49295 - protein, 19 aa, unidentified
  REGION 1..19: note = Description of Unknown:random_neg_ctrl neg_ctrl sequence
SVTAKELGSFAAIRRDPSD

SEQ ID NO: 49296 - protein, 35 aa, unidentified; identical to SEQ ID NO: 48989
  REGION 1..35: note = Description of Unknown:random_neg_ctrl neg_ctrl sequence

SEQ ID NO: 49297 - protein, 49 aa, unidentified; identical to SEQ ID NO: 48990
  REGION 1..49: note = Description of Unknown:random_neg_ctrl neg_ctrl sequence

SEQ ID NO: 49298 - protein, 15 aa, unidentified
  REGION 1..15: note = Description of Unknown:random_neg_ctrl neg_ctrl sequence
NGPLSADLGSVFEEL

SEQ ID NO: 49299 - protein, 74 aa, unidentified; identical to SEQ ID NO: 48992
  REGION 1..74: note = Description of Unknown:random_neg_ctrl neg_ctrl sequence

SEQ ID NO: 49300 - protein, 13 aa, unidentified
  REGION 1..13: note = Description of Unknown:random_neg_ctrl neg_ctrl sequence
SSSYLPSHYNILQ

SEQ ID NO: 49301 - protein, 9 aa, unidentified
  REGION 1..9: note = Description of Unknown:random_neg_ctrl neg_ctrl sequence
DEGLKAVST

SEQ ID NO: 49302 - protein, 62 aa, unidentified; identical to SEQ ID NO: 48995
  REGION 1..62: note = Description of Unknown:random_neg_ctrl neg_ctrl sequence

SEQ ID NO: 49303 - protein, 11 aa, unidentified
  REGION 1..11: note = Description of Unknown:random_neg_ctrl neg_ctrl sequence
QGKHHPEKMNS

SEQ ID NO: 49304 - protein, 55 aa, unidentified; identical to SEQ ID NO: 48997
  REGION 1..55: note = Description of Unknown:random_neg_ctrl neg_ctrl sequence

SEQ ID NO: 49305 - protein, 72 aa, unidentified; identical to SEQ ID NO: 48998
  REGION 1..72: note = Description of Unknown:random_neg_ctrl neg_ctrl sequence

SEQ ID NO: 49306 - protein, 69 aa, unidentified; identical to SEQ ID NO: 48999
  REGION 1..69: note = Description of Unknown:random_neg_ctrl neg_ctrl sequence

SEQ ID NO: 49307 - protein, 39 aa, unidentified; identical to SEQ ID NO: 49000
  REGION 1..39: note = Description of Unknown:random_neg_ctrl neg_ctrl sequence

SEQ ID NO: 49308 - protein, 7 aa, unidentified
  REGION 1..7: note = Description of Unknown:random_neg_ctrl neg_ctrl sequence
FAEIPHD

SEQ ID NO: 49309 - protein, 28 aa, unidentified
  REGION 1..28: note = Description of Unknown:random_neg_ctrl neg_ctrl sequence
PHKPQRDREEEFEIWIELPREPKGLELP

SEQ ID NO: 49310 - protein, 49 aa, unidentified; identical to SEQ ID NO: 49003
  REGION 1..49: note = Description of Unknown:random_neg_ctrl neg_ctrl sequence

SEQ ID NO: 49311 - protein, 52 aa, unidentified; identical to SEQ ID NO: 49004
  REGION 1..52: note = Description of Unknown:random_neg_ctrl neg_ctrl sequence

SEQ ID NO: 49312 - protein, 54 aa, unidentified; identical to SEQ ID NO: 49005
  REGION 1..54: note = Description of Unknown:random_neg_ctrl neg_ctrl sequence

SEQ ID NO: 49313 - protein, 65 aa, unidentified; identical to SEQ ID NO: 49006
  REGION 1..65: note = Description of Unknown:random_neg_ctrl neg_ctrl sequence

SEQ ID NO: 49314 - protein, 11 aa, unidentified
  REGION 1..11: note = Description of Unknown:random_neg_ctrl neg_ctrl sequence
TRLPYQEEDPA

SEQ ID NO: 49315 - protein, 34 aa, unidentified; identical to SEQ ID NO: 49008
  REGION 1..34: note = Description of Unknown:random_neg_ctrl neg_ctrl sequence

SEQ ID NO: 49316 - protein, 78 aa, unidentified; identical to SEQ ID NO: 49009
  REGION 1..78: note = Description of Unknown:random_neg_ctrl neg_ctrl sequence

SEQ ID NO: 49317 - protein, 14 aa, unidentified
  REGION 1..14: note = Description of Unknown:random_neg_ctrl neg_ctrl sequence
LIVADLRCNPGEKE

SEQ ID NO: 49318 - protein, 31 aa, unidentified; identical to SEQ ID NO: 49011
  REGION 1..31: note = Description of Unknown:random_neg_ctrl neg_ctrl sequence

SEQ ID NO: 49319 - protein, 33 aa, unidentified; identical to SEQ ID NO: 49012
  REGION 1..33: note = Description of Unknown:random_neg_ctrl neg_ctrl sequence

SEQ ID NO: 49320 - protein, 66 aa, unidentified; identical to SEQ ID NO: 49013
  REGION 1..66: note = Description of Unknown:random_neg_ctrl neg_ctrl sequence

SEQ ID NO: 49321 - protein, 57 aa, unidentified; identical to SEQ ID NO: 49014
  REGION 1..57: note = Description of Unknown:random_neg_ctrl neg_ctrl sequence

SEQ ID NO: 49322 - protein, 9 aa, unidentified
  REGION 1..9: note = Description of Unknown:random_neg_ctrl neg_ctrl sequence
IPLFLEASI

SEQ ID NO: 49323 - protein, 37 aa, unidentified; identical to SEQ ID NO: 49016
  REGION 1..37: note = Description of Unknown:random_neg_ctrl neg_ctrl sequence

SEQ ID NO: 49324 - protein, 15 aa, unidentified
  REGION 1..15: note = Description of Unknown:random_neg_ctrl neg_ctrl sequence
HILPETDQPSHGPPE

SEQ ID NO: 49325 - protein, 40 aa, unidentified; identical to SEQ ID NO: 49018
  REGION 1..40: note = Description of Unknown:random_neg_ctrl neg_ctrl sequence

SEQ ID NO: 49326 - protein, 67 aa, unidentified; identical to SEQ ID NO: 49019
  REGION 1..67: note = Description of Unknown:random_neg_ctrl neg_ctrl sequence

SEQ ID NO: 49327 - protein, 48 aa, unidentified; identical to SEQ ID NO: 49020
  REGION 1..48: note = Description of Unknown:random_neg_ctrl neg_ctrl sequence

SEQ ID NO: 49328 - protein, 18 aa, unidentified
  REGION 1..18: note = Description of Unknown:random_neg_ctrl neg_ctrl sequence
VSGYSKGVEEVKCREVIR

SEQ ID NO: 49329 - protein, 41 aa, unidentified; identical to SEQ ID NO: 49022
  REGION 1..41: note = Description of Unknown:random_neg_ctrl neg_ctrl sequence

SEQ ID NO: 49330 - protein, 8 aa, Homo sapiens
NCSFYWMT

SEQ ID NO: 49331 - protein, 5 aa, Homo sapiens
LYYKT

SEQ ID NO: 49332 - protein, 12 aa, Homo sapiens
KLMEGLQHPHSL

SEQ ID NO: 49333 - protein, 7 aa, unidentified
  REGION 1..7: note = Description of Unknown:cds_NZ_WFIY01000004.1_cds_2170 target sequence
IKGYSFY

SEQ ID NO: 49334 - protein, 85 aa, Homo sapiens
LTALICGFIIKLRNCLHDDGFLRQLYTIGLLAQFESLLSTYGEELAMLEDMSLGIMDLRNVTFKVTQATSSASADMLPVITGNRD

SEQ ID NO: 49335 - protein, 85 aa, Homo sapiens
LHGEGCEDVFPCAGSCTSKKGNPDSHAYWIRPEDPFCDVPSSPCPSTMPSTACHPHLTTHCSPPPEESSPGEWSEALYPLLTTLT

SEQ ID NO: 49336 - protein, 85 aa, Homo sapiens
LAERFGDTSLQEVINVESLVRLNSYFEQFKEVLPEDCLPRSRSQTCLPELLRFLGQNVHARKNKNVDILWQAAEICRRLNGVRFT

SEQ ID NO: 49337 - protein, 85 aa, Homo sapiens
LNAYLVRVGANGTCLWDPNFQGLCNAPLSAATEYRFKYVLVNMSTGLVEDQTLWSDPIRTNQLTPYSTIDTWPGRRSGGMIVITS

SEQ ID NO: 49338 - protein, 85 aa, Homo sapiens
LLGLLSLRRPAPRRLEPQADEGGGGGSGGGGRRCLSGGCGAPEEEEEAALVERRRAGEGGEEGDGPPGGKEEDEDDEEEEDEEEE

SEQ ID NO: 49339 - protein, 85 aa, Homo sapiens
LAALCALVNNLIEIRSDAFKLCTGLQRPFGQRVESIGQWQKVMEAMGVLAIVVNCYLIGQCGQLQRLFPWLSPEAAIVSVVVLEH

SEQ ID NO: 49340 - protein, 85 aa, Homo sapiens
LDPATSSEKASAKAKGSTAGGHGPERPKRPGSLLAPNNVMKLKQIIPLQGKFLSSGATSSLAAAGAGATTRPPPAQSPTGSDTRL

SEQ ID NO: 49341 - protein, 85 aa, Homo sapiens
LQAGRYLVSHKAWMKTVPTENCDVLMTFPDTTDDHTLLWLLNHIRVGIPELIVQVRHHRHTRAYAFFVTATYESLLRGADELGLR

SEQ ID NO: 49342 - protein, 85 aa, Homo sapiens
LVLSVKGLPRLARFLPKVMLALLVSVSAEGYKKLAIWLNDMENYRLESAYEKHLIIKVVLFQFVNSYLSLFYIGFYLKDMERLKE

SEQ ID NO: 49343 - protein, 85 aa, Homo sapiens
LMHTLLAATKDSLAMDPPVVNRPKKSKTKKAPIKTITKAAPAAPPVPAANEIATNKPKITWQALNLPVITQISQALPTTEVTNTQ

SEQ ID NO: 49344 - protein, 85 aa, Homo sapiens
LKNFDMVIVYKDYSKKVTMINAIPVASLDPIKEWLNSCDLKYTEGVQSLNWTKIMKTIVDDPEGFFEQGGWSFLEPEGEGSDAEE

SEQ ID NO: 49345 - protein, 84 aa, Homo sapiens
LDVVRRPRAASDSNPAGPLRDKVHPMILAQEEDDVLGEEAQGSPHDIIRIGVAGRPAPGRLHPVPTGPLPRMYSAGARGRHGAR

SEQ ID NO: 49346 - protein, 85 aa, Homo sapiens
LSASIAGQTESSSLHSACVHDSTVHSRVFQILYRNEEVPINDAVVFRVHLLLGGERMEDALSEVDFQLKVDLHFTDSEQQLRDVA

SEQ ID NO: 49347 - protein, 85 aa, Homo sapiens
LKREERARKRRLQAARRAEEHKNQTIERLTKTAATSGRGGRGGARGERRGGRAAAPAPMVRYCSGAQGSTLSFPPGVPAPTAVSQ

SEQ ID NO: 49348 - protein, 85 aa, Homo sapiens
LSENMKASSFKKLQKFYIDPYKLLPLQRFLPRPPGEKGPPRGGGRGGRGGGRGGGGRGGGRGGGFRGGRGGGGGGFRGGRGGGFR

SEQ ID NO: 49349 - protein, 85 aa, Homo sapiens
LANDPTIERIITPRLALTTAEFLAYQCEKHVLVILTDMSSYAEALREVSAAREEVPGRRGFPGYMYTDLATIYERAGRVEGRGGS

SEQ ID NO: 49350 - protein, 85 aa, Homo sapiens
LDYHDDNFAIVFAAMGVNMETARFFKSDFEQNGTMGNVCLFLNLANDPTIERIITPRLALTTAEFLAYQCEKHVLVILTDMSSYA

SEQ ID NO: 49351 - protein, 85 aa, Homo sapiens
LTMFGEKLNGTDPEDVIRNAFACFDEEATGTIQEDYLRELLTTMGDRFTDEEVDELYREAPIDKKGNFNYIEFTRILKHGAKDKD

SEQ ID NO: 49352 - protein, 85 aa, Homo sapiens
LRLLLDKKYALPYRVLDALVFHFLGFRTEKRELPVLWHQCLLTLVQRYKADLATDQKEALLELLRLQPHPQLSPEIRRELQSAVP

SEQ ID NO: 49353 - protein, 85 aa, Homo sapiens
LKALELLTNCYIMVQGNTVSAIGPFSGLKEVRKVVLDTMKNIHPIYNIKSLMIKRELAKDSELRSQSWERFLPQFKHKNVNKRKE

SEQ ID NO: 49354 - protein, 85 aa, Homo sapiens
LCHALTFPSLQRLVYSTCSLCQEENEDVVRDALQQNPGAFRLAPALPAWPHRGLSTFPGAEHCLRASPETTLSSGFFVAVIERVE

SEQ ID NO: 49355 - protein, 85 aa, Homo sapiens
LRDTHIYDARRLNSRRSQPLISLTEHTKSIASAYFSPLTGNRVVTTCADCNLRIFDSSCISSKIPLLTTIRHNTFTGRWLTRFQA

SEQ ID NO: 49356 - protein, 85 aa, Homo sapiens
LTWVNSSSVRWATRIQDMFTGGKLLALSLIIGVGLLQIFQGHFEELRPSNAFAFWMTPSVGHLALAFLQGSFAFSGWNFLNYVTE

SEQ ID NO: 49357 - protein, 85 aa, Homo sapiens
LYLVIALACISFLFLGCLLFFVCTKLHQSPGCCAQSCCRSTEDLRYGSKMVSNPCMTSATIDVTTVERLSQTYLYRASLGLGSDN

SEQ ID NO: 49358 - protein, 85 aa, Homo sapiens
LVSVSAYQHGMTFPGTDQRSMEPLGMDQRGCVISGMGQQGLVPPGIDQQGLTLPVVDQHGLVLPFTDQHGLVSPGLMPISADQQG

SEQ ID NO: 49359 - protein, 85 aa, Homo sapiens
LAQPGAVQHGLVQPGVDQRGLAQPRADHQRGLVPPGADQRGLVQPGADQHGLVQPGVDQHGLAQPGEVQRSLVQPGIVQRGLVQP

SEQ ID NO: 49360 - protein, 85 aa, Homo sapiens
LKKPKLSEEVVVAPNQESGMKTADSLRVLSGHLMQTRDLVQPDKPASPKFIVTLDGVPSPPGYMSDQEEDMCFEGMKPVNQTAAS

SEQ ID NO: 49361 - protein, 85 aa, Homo sapiens
LGSDEDSGNEDVFDMEYTEAEAEELKRNAETGNLPHSYRLISVVSHIGSTSSSGHYISDVYDIKKQAWFTYNDLEVSKIQEAAVQ

SEQ ID NO: 49362 - protein, 85 aa, Homo sapiens
LSHEDDDKPTSSPDTGFAEDDIQEMPENPDTMETEKPKTITELDPASFTEITKDCDENKENKTPEGSQGEVDWLQQYDMEREREE

SEQ ID NO: 49363 - protein, 85 aa, Homo sapiens
LPREFYAWIREHGPESGKALAAMVEDLTERALEAKAVPCHRQGEQEETALCRGAWEPGIQLGPVEVKPEWGMPPGEGVQGPDPGT

SEQ ID NO: 49364 - protein, 85 aa, Homo sapiens
LLKGKAPVDPECTAKVGKAHVYCEGNDVYDVMLNQTNLQFNNNKYYLIQLLEDDAQRNFSVWMRWGRVGKMGQHSLVACSGNLNK

SEQ ID NO: 49365 - protein, 85 aa, Homo sapiens
LGGSAGRLKMSSSGTLSNYYVDSLIGHEGDEVFAARFGPPGPGAQGRPAGVADGPAATAAEFASCSFAPRSAVFSASWSAVPSQP

SEQ ID NO: 49366 - protein, 85 aa, Homo sapiens
LSLVGWYHSHPHSPALPSLQDIDAQMDYQLRLQGSSNGFQPCLALLCSPYYSGNPGPESKISPFWVMPPPEMLLVEFYKGSPDLV

SEQ ID NO: 49367 - protein, 85 aa, Homo sapiens
LGKKTVVSEFYDEMIFQDPTAMMQQLLTTSRQLTLGAYKHETEFAELEVKTREKLEAAKKKTSFEIAELKERLKASRETINCLKN

SEQ ID NO: 49368 - protein, 85 aa, Homo sapiens
LESPTGSGKSLALLCSALAWQQSLSGKPADEGVSEKAEVQLSCCCACHSKDFTNNDMNQGTSRHFNYPSTPPSERNGTSSTCQDS

SEQ ID NO: 49369 - protein, 85 aa, Homo sapiens
LDSNVTMPKSEDEEGWKKFCLGEKLCADGAVGPATNESPGIDYVQATVTSVLEYLSNWFGERDFTPELGRWLYALLACLEKPLLP

SEQ ID NO: 49370 - protein, 84 aa, Homo sapiens
LLTKNSLYWLSTQKFCRCYCTHVTTYEESNYSLSYQFILNLFSFLLRIKTSLLHEEVSLVEKKLFEKKYSVKRKKSRSKKVRRH

SEQ ID NO: 49371 - protein, 5 aa, Homo sapiens
LKLKI

SEQ ID NO: 49372 - protein, 85 aa, Homo sapiens
LEMEISARRREKEEEKEKLWKKKELLQRAEKKKKIKKYWAKKKQKWQEMEMRDLQRLEELKKLIAEQSLKDRERVKYRQELLERR

SEQ ID NO: 49373 - protein, 85 aa, Homo sapiens
LMEKKEVALQEAHEDKERARRLEALRKQVAVVAQFDPVRMMSDTMASKARMGIEIEEEFILQKPLFTLNTYNEQQIISDPRLRFE

SEQ ID NO: 49374 - protein, 85 aa, Homo sapiens
LLECQVQVGAPEEEEEEEEDAGLVAEAEAVAAGWMLDFLCLSLCRAFRDGRSEDFRRTRNSAEAIIHGLSSLTACQLRTIYICQF

SEQ ID NO: 49375 - protein, 85 aa, Homo sapiens
LTRIAAGKTLDAQFENDERITPLESALMIWGSIEKEHDKLHEEIQNLIKIQAIAVCMENGNFKEAEEVFERIFGDPNSHMPFKSK

SEQ ID NO: 49376 - protein, 85 aa, Homo sapiens
LLMIISQKDTFHSFFQHFSYNHMMEKIKSYVNYVLSEKSSTFLMKAAAKVVESKRTRTITSQDKPSGNDVEMETEANLDTRKSVS

SEQ ID NO: 49377 - protein, 85 aa, Homo sapiens
LMDHQNLSEHVLCMVLYLIELGLENSAEEESDEEASVGGPERCHDSWFPGSNLVSNMRHFINYVRVRVPETAPEVKRDSPASTSS

SEQ ID NO: 49378 - protein, 85 aa, Homo sapiens
LVFGLQLSMARIGSTVNMNLMGWLYSKIEALLGSAGHTTLGITLMIGGITCILSLICALALAYLDQRAERILHKEQGKTGEVIKL

SEQ ID NO: 49379 - protein, 85 aa, Homo sapiens
LVLLLMCFLGFGSYFCYDNPAALQTQVKRDMQVNTTKFMLLYAWYSWPNVVLCFFGGFLIDRVFGIRWGTIIFSCFVCIGQVVFA

SEQ ID NO: 49380 - protein, 85 aa, Homo sapiens
LGGIFNAFWLMEFGRFVFGIGGESLAVAQNTYAVSWFKGKELNLVFGLQLSMARIGSTVNMNLMGWLYSKIEALLGSAGHTTLGI

SEQ ID NO: 49381 - protein, 85 aa, Homo sapiens
LTMASSPHGSPDVLPPASPSNGPALLRGTYFSTQDDVDLYTDSEPRATYRRQDALRPDVWLLRNDAHSLYHKRSPPAKESALSKC

SEQ ID NO: 49382 - protein, 85 aa, Homo sapiens
LLDKKTGLYEYKVFGVLEDCSPTLLADIYMDSDYRKQWDQYVKELYEQECNGETVVYWEVKYPFPMSNRDYVYLRQRRDLDMEGR

SEQ ID NO: 49383 - protein, 85 aa, Homo sapiens
LKINKVDMQWVQVLAEGWATPLNGFMREREYLQCLHFDCLLDGGVINLSVPIVLTATHEDKERLDGCTAFALMYEGRRVAILRNP

SEQ ID NO: 49384 - protein, 85 aa, Homo sapiens
LDRVYWNDGLDQYRLTPTELKQKFKDMNADAVFAFQLRNPVHNGHALLMQDTHKQLLERGYRRPVLLLHPLGGWTKDDDVPLMWR

SEQ ID NO: 49385 - protein, 85 aa, Homo sapiens
LVSMGYPVSKPDVISKLEQGEEPWIIKGDISNWIYPDEYQADGRQDRKSNLHNSQSCILGTVSFHHKILKGVTRDGSLCSILKVC

SEQ ID NO: 49386 - protein, 85 aa, Homo sapiens
LQEESDLSLIIAQIVQKLKGSNLYSQLERQAWASLQRPEIKLESLKEDIKEFFKISGWEKKLQNAVYSELSVFPLPSHPAAPPEH

SEQ ID NO: 49387 - protein, 85 aa, Homo sapiens
LDNMPLRGKQLRVRFACHSASLTVRNLPQYVSNELLEEAFSVFGQVERAVVIVDDRGRPSGKGIVEFSGKPAARKALDRCSEGSF

SEQ ID NO: 49388 - protein, 85 aa, Homo sapiens
LLTTFPRPVTVEPMDQLDDEEGLPEKLVIKNQQFHKEREQPPRFAQPGSFEYEYAMRWKALIEMEKQQQDQVDRNIKEAREKLEM

SEQ ID NO: 49389 - protein, 85 aa, Homo sapiens
LPPAAPISYRLAEQQPLLRHPAPPGPGPGPGPGPGPGADMQRSYDSYYYPAAGPGPRRGTCALGGSLGSLPASPFRIPEDDEYET

SEQ ID NO: 49390 - protein, 85 aa, Homo sapiens
LVALQQPLISFTRPGRGSWLGKGGPDTGQEQSIISLENLVFGAGYCKPTSSEGSFYITSENCMQHAHKWHRDLCLLLLHAYRGLR

SEQ ID NO: 49391 - protein, 85 aa, Homo sapiens
LRVRRFSEAFFYMEHQKLAVLTFQENLIQTHSQLSLDIRNSEYLTSMPPLPAECLDIDGDWNTLPVIFEDRYVDCPATGHNLSVY

SEQ ID NO: 49392 - protein, 85 aa, Homo sapiens
LSCTSAADAINRNSTGQQSQSGSPCIMDDTAFNRGVNAFPEAKHKAGTVCPTVTHSVHSQVLKNQELKAGTSIMGSHLTSAETFT

SEQ ID NO: 49393 - protein, 85 aa, Homo sapiens
LDSLKAVEVVNLSVSCTATCLPFSSVPKETPARAGFSSKQTLFPITHQPLGSFGVVSTHSSTLDEEVSERMFRGRGRKFGRWNSP

SEQ ID NO: 49394 - protein, 85 aa, Homo sapiens
LKYSKTLTEHLKNSYNNSQAPSPGLGSKAVGMPSPVSPKLSPGNSGNYSSGASSASASGSSVTIPQKIHQMAASYVQVTSNFLYA

SEQ ID NO: 49395 - protein, 85 aa, Homo sapiens
LLMIISQKDTFHSFFQHFSYNHMMEKIKSYVNYVLSEKSSTFLMKAAAKVVESKRTRTITSQDKPSGNDVEMETEANLDTRKRSH

SEQ ID NO: 49396 - protein, 85 aa, Homo sapiens
LVLFETSVGYAIFKVLNEKKLQEVDSLWKEFETPEKANKIVKLKHFEKFQDTAEALAAFTALMEGKINKQLKKVLKKIVKEAHEP

SEQ ID NO: 49397 - protein, 85 aa, Homo sapiens
LAVADAKLGGVIKEKLNLSCIHSPVVNELMRGIRSQMDGLIPGVEPREMAAMCLGLAHSLSRYRLKFSADKVDTMIVQAISLLDD

SEQ ID NO: 49398 - protein, 85 aa, Homo sapiens
LDKELNNYIMRCREWYGWHFPELGKIISDNLTYCKCLQKVGDRKNYASAKLSELLPEEVEAEVKAAAEISMGTEVSEEDICNILH

SEQ ID NO: 49399 - protein, 85 aa, Homo sapiens
LCQFPKLEELSLEGNPFLTVNDNLKVSFLLPTLRKVNGKDASSTYSQVENLNRELTSRVTAHWEKFMATLGPEEEAEKAQADFVK

SEQ ID NO: 49400 - protein, 85 aa, Homo sapiens
LAYFSLSACPDKGIVLCGDEEGNVWLYDVSNILKQPPLLPAALQAPTQILKWPQPWALGQVVTKTMVNTVVANASFTYLTALTDS

SEQ ID NO: 49401 - protein, 85 aa, Homo sapiens
LAPACLAGTWALGVGAKYTLGLHAGPMNLRAAFSLVAAVAGFVAYAFSQDSLTHAVESWLDRRTASLSAAYACGGVEFYEKLLSG

SEQ ID NO: 49402 - protein, 85 aa, Homo sapiens
LEPGVNPSHLMNLFTYEKGYCFVYYLSQLCGDPQRFDDFLRAYVEKYKFTSVVAQDLLDSFLSFFPELKEQSVDCRAGLEFERWL

SEQ ID NO: 49403 - protein, 85 aa, Homo sapiens
LQLGLELRPEARELAGCLVLELCALRPAPRALVLDAHPALRLHSAAFRRAPAAAAETPCAFAFSAPGPGPAPPPPLPAFPEAPGS

SEQ ID NO: 49404 - protein, 85 aa, Homo sapiens
LSAAERLYGPYMWGRYDIVFLPPSFPIVAMENPCLTFIISSILESDEFLVIDVIHEVAHSWFGNAVTNATWEEMWLSEGLATYAQ

SEQ ID NO: 49405 - protein, 85 aa, Homo sapiens
LGMYVPDRFSLKSSRVQDGMGLYTARRVRKGEKFGPFAGEKRMPEDLDENMDYRLMWEVRGSKGEVLYILDATNPRHSNWLRFVH

SEQ ID NO: 49406 - protein, 85 aa, Homo sapiens
LQRHVLQCTAKSSLKESSRSFQCSVCNSSFSSASSFEQHQETCRGDARFVCKADSCGKRLKSKDALKRHQENVHTGDPKKKLICS

SEQ ID NO: 49407 - protein, 85 aa, Homo sapiens
LWGSPAEEDAFGLGGLGGLTPNPVILQDCMWSGFSAREKLERAVSEKLQHGRGPPTAGSTAQSPGAGAASPAGRGHGGAAGAGRA

SEQ ID NO: 49408 - protein, 85 aa, Homo sapiens
LELRHRGSCPGPREAVSPPHREGEAAGGDHETESTSDKETDIDDRYGDLDSRTDSDIPEIPPSSDRTPEILKKALSGLSSRWKNW

SEQ ID NO: 49409 - protein, 85 aa, Homo sapiens
LRQERVSLYPFQIHSIALSTFASLIGPFGGFFASGFKRAFKIKDFANTIPGHGGIMDRFDCQYLMATFVHVYITSFIRGPNPSKV

SEQ ID NO: 49410 - protein, 85 aa, Homo sapiens
LSIIATVMILPVTHTEISPEQQFDRSVQRLLATRIAVYLMTFLIVTVAWAAHTRLFQVVGKTDDTLALLNLACMMTITFLPYTFS

SEQ ID NO: 49411 - protein, 85 aa, Homo sapiens
LELLYLPENKPCYLLDIGCGTGLSGSYLSDEGHYWVGLDISPAMLDEAVDREIEGDLLLGDMGQGIPFKPGTFDGCISISAVQWL

SEQ ID NO: 49412 - protein, 85 aa, Homo sapiens
LDILEDYCMWRNYEYCRLDGQTPHDERQDSINAYNEPNSTKFVFMLSTRAGGLGINLATADVVILYDSDWNPQVDLQAMDRAHRI

SEQ ID NO: 49413 - protein, 85 aa, Homo sapiens
LEQPLALTKNSLDASRPAGLSPTLTPGERQQNRPSVITCASAGARNCNLSHCPIAHSGCAAPGPASYRRPPSAATTCDPVVEEHF

SEQ ID NO: 49414 - protein, 85 aa, Homo sapiens
LLLHTICLGEKAKEEMHRVEILPPANQEDKKMQPVTIASLQASVLPMVSMVGVQLSPPVTFQLRAGSGPVFLSGQERYEASDLTW

SEQ ID NO: 49415 - protein, 85 aa, Homo sapiens
LMDEGASSEKKRQSSADGSQPPKKKPKTTNIELQGVPNDEVHPLLGVKGDGKSKKKQAGRPKGSKGKEKDSPFKPKLYKGDRGLP

SEQ ID NO: 49416 - protein, 85 aa, Homo sapiens
LDVAWHPVRPIIASISSGVVSIWAQNQVENWSAFAPDFKELDENVEYEERESEFDIEDEDKSEPEQTGADAAEDEEVDVTSVDPI

SEQ ID NO: 49417 - protein, 85 aa, Homo sapiens
LSPPAVPPPPVPVLPGAVPSQTERLPPCQLLRRESSVGYRVPAGSGPSLPPMPSLQEVDCGSPSSSEEEGVPGSRGSPATSPHLG

SEQ ID NO: 49418 - protein, 85 aa, Homo sapiens
LDQGTGAALCFFNPLFPGDLGPTKREKFKRSFKVRVSTETSSPLSPPAVPPPPVPVLPGAVPSQTERLPPCQLLRRESSVGYRVP

SEQ ID NO: 49419 - protein, 85 aa, Homo sapiens
LYYMLHPRDGGCPAKRLRSENGSDADMVDKNKCCTLCNMSFTSAVVADSHYQGKIHAKRLKLLLGEKTPLKTTGLRRNYRCTICS

SEQ ID NO: 49420 - protein, 85 aa, Homo sapiens
LKNQCTDVGIKEGPLSPAQTSQVTSLSSWTGYLLFQPVASSHLEQREALWIEEKGTPQASCSDWMTVLRNQDSTYKKVALQEEPA

SEQ ID NO: 49421 - protein, 85 aa, Homo sapiens
LEQREALWIEEKGTPQASCSDWMTVLRNQDSTYKKVALQEEPASGINMIKLIREDGGWKQLEDSHEDPQGLLSQKASLHVVAVPQ

SEQ ID NO: 49422 - protein, 85 aa, Homo sapiens
LENGQSLNHGMALTIHNKINTAEKPFECHQCGKVFNRRHSLSEHQRIHTGEKPYECQECGRAFTHSSTLTRHLRTHTGEKPYGCG

SEQ ID NO: 49423 - protein, 85 aa, Homo sapiens
LEFLHKTPVEEVPAAIAPFQGRVLIGVGKLLRVYDLGKKKLLRKCENKHIANYISGIQTIGHRVIVSDVQESFIWVRYKRNENQL

SEQ ID NO: 49424 - protein, 84 aa, Homo sapiens
LPAWPHRGLSTFPGAEHCLRASPETTLSSGFFVAVIERVEVPSLTGQSISTRTHTQPSPKEKEETAKSRSRCLHTALHIAEAPG

SEQ ID NO: 49425 - protein, 85 aa, Homo sapiens
LDSDPFGEDGSLWSFNYFFYNKRLKRIVFFSCRSISGSTYTPSEAGNELDMELGEEEVEEESRSGGSGAEETSTMEEDRVPVICI

SEQ ID NO: 49426 - protein, 85 aa, Homo sapiens
LTQPPNGNQTSSGTGILKASSSHPSSQPNLTKNTNQLIVCQLQRMLSIAVEVDRTPTCSSNKIAEMMFGFVLDIPERSQREMFFT

SEQ ID NO: 49427 - protein, 85 aa, Homo sapiens
LLKCQSDKSQWQTWDELVEHLQFLLSSYQHVLREHLRSSVIDRKDLIIKRIKPKPQQGDDITVVDVEKQIEAFRSRLIQMLGEPL

SEQ ID NO: 49428 - protein, 85 aa, Homo sapiens
LCAGAFGALAAASAKLAFGSEVSMGLCVLGIIVMASTNSLMWTFFSRGLSFSMSSAIASVTVTFSNILSSAFLGYVLYGECQEVL

SEQ ID NO: 49429 - protein, 85 aa, Homo sapiens
LPMTAASHSSAFTPVTAAASPVSLPRTPRIANGIATRLGSHAAVGASAPSAPTAHPQPRPPQGPLALPGPSYAGNSPLIGRISFI

SEQ ID NO: 49430 - protein, 85 aa, Homo sapiens
LYEVGRQRLAEDEDEEEDQEEEEQEEEDDDEDDDDTDDLDELDTDQLLEAELEEDDNNENAGEDGDNDFSPSDEELANLLEEGED

SEQ ID NO: 49431 - protein, 85 aa, Homo sapiens
LGVGDTLYLVNGLHPLTLRWEETRTPESQPDTPPGTPLVSQDEKRDAELPKKRMRKSNPGWENLEKLLVFTAAGVKPQGKVAGFD

SEQ ID NO: 49432 - protein, 85 aa, Homo sapiens
LDGTLITTRSGKVFPTGPSDWRILYPEIPRKLRELEAEGYKLVIFTNQMSIGRGKLPAEEFKAKVEAVVEKLGVPFQVLVATHAG

SEQ ID NO: 49433 - protein, 85 aa, Homo sapiens
LYRKPVTGMWDHLQEQANDGTPISIGDSIFVGDAAGRPANWAPGRKKKDFSCADRLFALNLGLPFATPEEFFLKWPAAGFELPAF

SEQ ID NO: 49434 - protein, 85 aa, Homo sapiens
LLESVSGLLQPRTGSAVAPVHPPNRSAPHLPGLMCLLRLHGSVGGAQNLSALGALVSLSNARLSSIKTRFEGLCLLSLLVGESPT

SEQ ID NO: 49435 - protein, 85 aa, Homo sapiens
LDLLSALILACGSRLLRFGILIGRLLPQVLNSWSIGRDSLSPGQERPYSTVRTKVYAILELWVQVCGASAGMLQGGASGEALLTH

SEQ ID NO: 49436 - protein, 85 aa, Homo sapiens
LLSDISPPADALKLRSPRGSPDGSLQTGKPSAPKKLKLDVGEAMAPPSHRKGDSNANSDVCAAALRGLSRTILMCGPLIKEETHR

SEQ ID NO: 49437 - protein, 85 aa, Homo sapiens
LSSVGCWHGAKDEEVPSKQCVSVRVLQVTIPKPALSTLKAQPCKMCSSILKDILHLAEHDGTHPEQGLYTCAAEHDLHQKEQIRE

SEQ ID NO: 49438 - protein, 85 aa, Homo sapiens
LAYHAYQKWVREHGPEHPLPRLKYTHDQLFFIAFAQNWCIKRRSQSIYLQVLTDKHAPEHYRVLGSVSQFEEFGRAFHCPKDSPM

SEQ ID NO: 49439 - protein, 85 aa, Homo sapiens
LLQAVTNTQVIDGFFVKRTADIKESAAYLALLTRGLQRLYQGHTLRSRPWGTPGNPESGAMTSPNPLCSLLTFSDFNAGAIKNKA

SEQ ID NO: 49440 - protein, 85 aa, Homo sapiens
LQLNMVYQEVIQEKLAEANLLLAQNREQQEELMRDLAGSKGTKVKDGKSLPPSTYMGHFMKPYFKDKVTGVGPPANEDTREKAAQ

SEQ ID NO: 49441 - protein, 84 aa, Homo sapiens
LGLPTALKRGVVTLLSDYEVCKEGDVLTPEQARVLKLFGYEMAEFKVTIKYMWDSQSGRFQQMGDDLPESASESTEESDSEDDD

SEQ ID NO: 49442 - protein, 85 aa, Homo sapiens
LNPPKEEHIGKKKSGGDQTSVDPMVLEQYVVVANYQKQESSEISLSVGQVVDIIEKNESGWWFVSTAEEQGWVPATCLEGQDGVQ

SEQ ID NO: 49443 - protein, 85 aa, Homo sapiens
LWCEECNNAHASVCPKHGPLHPIPNRPVLTRARASLPLVLYIDRFLGGVFSKRRIPKRTQFGPVEGPLVRGSELKDCYIHLKVSL

SEQ ID NO: 49444 - protein, 85 aa, Homo sapiens
LLKDHVAIHINDGYFTCPTCKKRFPDFIQVKKHVRSFHSEKIYQCTECDKAFCRPDKLRLHMLRHSDRKDFLCSTCGKQFKRKDK

SEQ ID NO: 49445 - protein, 85 aa, Homo sapiens
LEAKEEEDEDEDEDTEEDEEEDGEDTDLDDWEPDPPRPFDPHDLWCEECNNAHASVCPKHGPLHPIPNRPVLTRARASLPLVLYI

SEQ ID NO: 49446 - protein, 85 aa, Homo sapiens
LQQQQQQQQNSSVQHTYLPSAWNSFRGYSSEIQMMTLPPGQFVITDSGVATPVTTGQVKAVTSGHYVLSESQSELEEKQTSALSG

SEQ ID NO: 49447 - protein, 84 aa, Homo sapiens
LRVSCEAPGDGDPFQGLLSGVAQMKDMVTELFDPLVQGEVQHRVAAAPDEDLDGDDEDDAEDENNIDNRTNFDGPSAKRPKTPS

SEQ ID NO: 49448 - protein, 85 aa, Homo sapiens
LSESTPIRTSDVDYRLLEASKAGDLETVKQLCSSQNVNCRDLEGRHSTPLHFAAGYNRVSVVEYLLHHGADVHAKDKGGLVPLHN

SEQ ID NO: 49449 - protein, 85 aa, Homo sapiens
LTPCSSASNDSSAQSVSSGVRAPSPAPSSVPLGSEKPSNVSQDRKVPVPIGTERSARIRQTGTSAPSVIGSNLSTSVGHSGIWSF

SEQ ID NO: 49450 - protein, 85 aa, Homo sapiens
LSDTPAPKRKRSPPLGGAPSPSSLSLPPSTGFPLQASGVPSPYLSSMAVGPPDCPVGGPLTFPGRGSGAGVGTTLTPLPPPKMPP

SEQ ID NO: 49451 - protein, 85 aa, Homo sapiens
LKVSRDKSFLLDRLLQYENVDEDSSDSDATASSDNSETEGTPKLSDTPAPKRKRSPPLGGAPSPSSLSLPPSTGFPLQASGVPSP

SEQ ID NO: 49452 - protein, 85 aa, Homo sapiens
LCRDWLRPEVHTKEQMLELLVLEQFLSALPADTQAWVCSRQPQSGEEAVALLEELWGPAASPDGSSATRVPQDVTQGPGATGGKE

SEQ ID NO: 49453 - protein, 85 aa, Homo sapiens
LFGGLIGSAFSVLQFLCAPLTGATSDCLGRRPVMLLCLMGVATSYAVWATSRSFAAFLASRLIGGISKGNVSLSTAIVADLGSPL

SEQ ID NO: 49454 - protein, 85 aa, Homo sapiens
LFLEYVALSQRFIPELINFLLGILYIATPNKASQGSTLVHPFRALGKNSELLVVSAREDVATWQQSSLSLRWASRLRAPTSTEAN

SEQ ID NO: 49455 - protein, 85 aa, Homo sapiens
LGRKTRHDVGLPGVSRARALRKRTQTLLKEYKERDKSNVFRDKRFGEYNSNMSPEEKMMKRFALEQQRHHEKKSIYNLNEDEELT

SEQ ID NO: 49456 - protein, 85 aa, Homo sapiens
LLFPTSDFWHPVVTPALVCLSQLLTKCPILSLQDVVKGLFVCCLFLEYVALSQRFIPELINFLLGILYIATPNKASQGSTLVHPF

SEQ ID NO: 49457 - protein, 84 aa, Homo sapiens
LHKKIQVGQHGHSSVEDATTAMELYRLVEVQWEQQEARSLWTCPEDREPDSSTDMEQYMEDQYWPDDLAHGSRGGAREAQDRRN

SEQ ID NO: 49458 - protein, 85 aa, Homo sapiens
LARCSIVSYHGNVLYDKYIRPEMPIADYRTRWSGITRQHMRKAVPFQVAQKEILKLLKGKVVVGHALHNDFQALKYVHPRSQTRD

SEQ ID NO: 49459 - protein, 85 aa, Homo sapiens
LSAVSLPRREPTVSSFYVKRAELWDTWKVAHLKEHRRVFQAMWLSFLKHKLPLSLYKKVLLIVHDAILPQLAQPTLMIDFLTRAC

SEQ ID NO: 49460 - protein, 85 aa, Homo sapiens
LLMVLPFICNLLRRHPACRVLVHRPHGPELDADPYDPGEEDPAQSRALESSLWELQALQRHYHPEVSKAASVINQALSMPEVSIA

SEQ ID NO: 49461 - protein, 85 aa, Homo sapiens
LGTFEFDETSFWNSSHPRGWNDHVHILDTETFTWSQPITTGKAPSPRAAHACATVGNRGFVFGGRYRDARMNDLHYLNLDTWEWN

SEQ ID NO: 49462 - protein, 85 aa, Homo sapiens
LGDSVSTGTTDQQGGVAEVKGTQLGDKLDSFIKPPECSSDVNLELRQRNRGDLTADSVQRGSRHGLEQYLSRFEEAMKLRKQLIS

SEQ ID NO: 49463 - protein, 85 aa, Homo sapiens
LYYMLHPRDGGCPAKRLRSENGSDADMVDKNKCCTLCNMSFTSAVVADSHYQGKIHAKRLKLLLGEKTPLKTTATPLSPLKPPRM

SEQ ID NO: 49464 - protein, 85 aa, Homo sapiens
LSHDLLIDILSSDNLNVEKEETVREAAMLWLEYNTESRSQYLSSVLSQIRIDALSEVTQRAWFQGLPPNDKSVVVQGLYKSMPKF

SEQ ID NO: 49465 - protein, 85 aa, Homo sapiens
LAHLAPLFDNPKLDKELRAMLREKFPEFCSSPSPPVEVKIEEPVSMEMDNHMSDKDESCYDNAEAAFSDDEEDLNSKGKKREFRF

SEQ ID NO: 49466 - protein, 85 aa, Homo sapiens
LLIKNNSLPRKRQSLRSSSSKLAQLTLEQILEHLDNLRLNLTNTKQNFFSQTPILQALQHVQASCDEAHKMKFSDLFSLAEEYED

SEQ ID NO: 49467 - protein, 85 aa, Homo sapiens
LEQFLTILPREFYAWIREHGPESGKALAAMVEDLTERALEAKAVPCHRQGEQEETALCRGAWEPGIQLGPVEVKPEWGMPPGEGV

SEQ ID NO: 49468 - protein, 85 aa, Homo sapiens
LRGPPGSQSQQGPPQGSLGPPPQGGMQGPPGPQGQQNPARGPHPSQGPIPFQQQKTPLLGDGPRAPFNQEGQSTGPPPLIPGLGQ

SEQ ID NO: 49469 - protein, 85 aa, Homo sapiens
LAHIFRHAAKELFNEDVEEVTYRALRNKDFQEVTLEKNGEVVLRFAAAYGFRNIQNMILKLKKGKFPFHFVEVLACAGGCLNGRG

SEQ ID NO: 49470 - protein, 85 aa, Homo sapiens
LERRARKTENWLSEWWLKTAYLQYRQPVVIYSSPGVMLPKQDFVDLQGQLRFAAKLIEGVLDFKVMIDNETLPVEYLGGKPLCMN

SEQ ID NO: 49471 - protein, 85 aa, Homo sapiens
LDVYHSDGTPLTADQIFVQLEKIWNSSLQTNKEPVGILTSNHRNSWAKAYNTLIKDKVNRDSVRSIQKSIFTVCLDATMPRVSED

SEQ ID NO: 49472 - protein, 85 aa, Homo sapiens
LAQDPLFGSVCFSYTNGCHLKPSLLLRPRGKDERLVTVRLHPCPPPDFFRPCRLLPTKNNVRSAWYRGQSPAGDGSPEPPTPRYN

SEQ ID NO: 49473 - protein, 85 aa, Homo sapiens
LMSAIGLPVCLSRAPQPTSPPASRLASKSHGSVKRLRKMSVKGATPKPEPEPEQVIKNYTEELKVPPDEDCIICMEKLSTASGYS

SEQ ID NO: 49474 - protein, 85 aa, Homo sapiens
LTQLKAKSEGKLAKQICKVVLDHFEKQYSKELGDAWNTVREILTSPSCWQYAVLLNRFNYPFELEKDLHLKGYHTLSQGSLPNYP

SEQ ID NO: 49475 - protein, 84 aa, Homo sapiens
LLRLQVTIVVLGNKCDLQEQRRVDPDVAQHWAKSEKVKLWEVSVADRRSLLEPFVYLASKMTQPQSKSAFPLSRKNKGSGSLDG

SEQ ID NO: 49476 - protein, 85 aa, Homo sapiens
LEVENQSLRGVVQELQQAISKLEARLNVLEKSSPGHRATAPQTQHVSPMRQVEPPAKKPATPAEDDEDDDIDLFGSDNEEEDKEA

SEQ ID NO: 49477 - protein, 85 aa, Homo sapiens
LKVNGAHVESASGFSGCHADGESGSPSSSSSGSLALGSAAIRGQAEVTQDPAPLLRGFRKPATGQMKRNRGEEIDFETPGSILVN

SEQ ID NO: 49478 - protein, 85 aa, Homo sapiens
LQNRAFDDELGLGGSCPPMRESDTRQENLKTKALVSNSSLHWIPIPSNDEVVKQPKPESREHIPSVEPQVGEEWEKAAPTPPALP

SEQ ID NO: 49479 - protein, 85 aa, Homo sapiens
LQGSLPLEKVLPPAHDDSMSESPQVPLTKDQSHGSLRMGSLHGLGKNSGMVDGSSPSSLRALKEPLLPDSCETGTGLARIEATQA

SEQ ID NO: 49480 - protein, 85 aa, Homo sapiens
LQSERRLQGHRQEVCGLKWSTDHQLLASGGNDNKLLVWNHSSLSPVQQYTEHLAAVKAIAWSPHQHGLLASGGGTADRCIRFWNT

SEQ ID NO: 49481 - protein, 85 aa, Homo sapiens
LTGQPLQCIDTGSQVCNLAWSKHANELVSTHGYSQNQILVWKYPSLTQVAKLTGHSYRVLYLAMSPDGEAIVTGAGDETLRFWNV

SEQ ID NO: 49482 - protein, 85 aa, Homo sapiens
LDSNVTMPKSEDEEGWKKFCLGEKLCADGAVGPATNESPGIDYVQIGFPPLLSIVSRMNQATVTSVLEYLSNWFGERDFTPELGR

SEQ ID NO: 49483 - protein, 85 aa, Homo sapiens
LVLLLLSVVFLATYYKRKRTKQEPSSQGSQSALQTYELGSENVKVPIFEEDTPSVMEIEMEELDKWMNSMNRNADFECLPTLKEE

SEQ ID NO: 49484 - protein, 85 aa, Homo sapiens
LRGIFPECAYGTRYLDDLCVKILREDKNCPGSTQLVKWMLGCYDALQKKYVYTNPEDPQTISECYQFKFKYTNNGPLMDFISKNQ

SEQ ID NO: 49485 - protein, 85 aa, Homo sapiens
LVTPRTVVATSTPPPLINAQQASPGCISPSLPPPPLKLLKGSVEAASNAHLLQSKSGTQPHAATRLSLQQPRAELPGQPEMKTQL

SEQ ID NO: 49486 - protein, 85 aa, Homo sapiens
LSIPKNFRKGDKDLATPSEAKKPEEEAGSSEQPSPCPAPGPSLPVTLGPSGILESPMAPAPAATPEPPAQPLQGPVQLAVPIYSS

SEQ ID NO: 49487 - protein, 84 aa, Homo sapiens
LAPNASNHMAVTRSRKEGLASATKDCSHREEKVTAGWPSEPGQGDLNPESPAALGQDLLEPRSKRPAHPILATADGASQLVGME

SEQ ID NO: 49488 - protein, 85 aa, Homo sapiens
LPDDNQAIQLQTLKCQLPQDPGCTNLLSLSPFEAASLGGSLTVLPATKDSIKHLSLQPFQKGFIIQPDSSIVVKPISGESAIELA

SEQ ID NO: 49489 - protein, 85 aa, Homo sapiens
LLSVGHQAFHRDTFHFLREEKIWMMKTAIQREGNSGDKIQTEMETVSEAGTHQEWSFQQIWEKIASDLTRSQDLMINSSQFSKEG

SEQ ID NO: 49490 - protein, 85 aa, Homo sapiens
LARGELEGLIPVDLAELLISKYGEKEAVKVVLKGLKVMNLLELVDQLSHICLHDYREVYREHVRCLEEWQEAGVNGRYNQVLLVA

SEQ ID NO: 49491 - protein, 85 aa, Homo sapiens
LLESKLEQLLFWCCGDNQAPVTEILRQPERLLFILDGFDELQRPFEEKLKKRGLSPKESLLHLLIRRHTLPTCSLLITTRPLALR

SEQ ID NO: 49492 - protein, 85 aa, Homo sapiens
LDLFGNTFEQPKVLPVIKLQAPLTLLESSARTILHNRIPYGSHIIPFHLCQDLDTAKICVCGRFCLNSFIQGTTTMNLHSVAHTV

SEQ ID NO: 49493 - protein, 85 aa, Homo sapiens
LQKRKQIQLRHEEEHRRREEEMIRHREQEELRRQQEGFKPNYMENREQEMRMGDMGPRGAINMGDAFSPAPAGNQGPPPMMGMNM

SEQ ID NO: 49494 - protein, 85 aa, Homo sapiens
LAEIAKAELDGTILKSRPLRIRFATHGAALTVKNLSPVVSNELLEQAFSQFGPVEKAVVVVDDRGRATGKGFVEFAAKPPARKAL

SEQ ID NO: 49495 - protein, 85 aa, Homo sapiens
LRHINKCPEHVLRHTQGRRYQRALCKYEECQKQGVEYVPACLVHRRRRREDQMDGDGPRPREAFWEPTSSDEGGAASDDSMTDLY

SEQ ID NO: 49496 - protein, 85 aa, Homo sapiens
LDEPAILVSEFLDRFQSLCHLDLQLPSLRPEDLKTMCLTEDKISLLLHLLEDELDHRTDERKTTIKLGSDIQVHVTACILSVCGW

SEQ ID NO: 49497 - protein, 85 aa, Homo sapiens
LAGFTELSETSGHTQESLTAGKATKIPCESPPLEVVDTTASTKRHLRTRVQKVQVKEEPSAVKFTQTSGETTDADKEPAGEDKGI

SEQ ID NO: 49498 - protein, 85 aa, Homo sapiens
LANGAADSFTSAPKQTPDSGKPLKISRRVLRAPKVEPVGDVVSTRDPVKSQSKSNTSLPPLPFKRGGGKDGSVTGTKRLRCMPAP

SEQ ID NO: 49499 - protein, 85 aa, Homo sapiens
LENKLPVVEKFLSDKNNPDVCDEYKRTALHRACLEGHLAIVEKLMEAGAQIEFRDMLESTAIHWASRGGNLDVLKLLLNKGAKIS

SEQ ID NO: 49500 - protein, 85 aa, Homo sapiens
LEQLILKYGMHQNTLRIKEIHDGLDFYYSSKQHAQKMVEFLQCTVPCRYKASQRLISQDIHSNTYNYKSTFSVEIVPICKDNVVC

SEQ ID NO: 49501 - protein, 85 aa, Homo sapiens
LSPKLAQSLGNMNQICVCIRVTSAIHLIDPNTLQVADIDGSTFWSHPFNSLCHPKQLEEFIVMECSIVQDIKRAAGAGMISKKHT

SEQ ID NO: 49502 - protein, 85 aa, Homo sapiens
LPVLPEKLFEEKEKVKEKEKKKDKKEKKKKKEKEKEKKEKEREKEKREREKREKEKEKHKHEKIKVEPVALAPSPVIPRLTLRVG

SEQ ID NO: 49503 - protein, 85 aa, Homo sapiens
LLQTKAPLAATARRCRRCRCPNCQAAGGAPEAEPGKKKQHVCHVPGCGKVYGKTSHLKAHLRWHTGERPFVCNWLFCGKSFTRSD

SEQ ID NO: 49504 - protein, 85 aa, Homo sapiens
LAPYSVDQSLSTAACLRRLFRAIFMADAFSELQAPPLMGTVVMAQGHRNCGEDWFRPKLNYRVPSRGHKLTVTLSCGRPSIRTTA

SEQ ID NO: 49505 - protein, 85 aa, Homo sapiens
LRDTMKSWNDSQSDLCSTDQEEEEEMIFGENEDDLDEMMDLSDLPTSLFACSVHEAVFEAREQKERNMNFTREQSRHPAWWFMSV

SEQ ID NO: 49506 - protein, 85 aa, Homo sapiens
LKDTLSAYISADDISILNERVELLQRQWEELCHQLSLRRQQIGERLNEWAVFSEKNKELCEWLTQMESKVSQNGDILIEEMIEKL

SEQ ID NO: 49507 - protein, 85 aa, Homo sapiens
LGDTEEELEQLQRLELSTDIQTIELQIKKLKELQKAVDHRKAIILSINLCSPEFTQADSKESRDLQDRLSQMNGRWDRVCSLLEE

SEQ ID NO: 49508 - protein, 85 aa, Homo sapiens
LVPYLSYILDTLVFAFGKYQHKNLLILYDAIGTLADSVGHHLNQPEYIQKLMPPLIQKWNELKDEDKDLFPLLECLSSVATALQS

SEQ ID NO: 49509 - protein, 85 aa, Homo sapiens
LQDLYMAVTTQEVQVGQKHQGAGDPHTSNSASLQGIDSQCVNQPEQLVSSAPTLSAPEKESTGTSGPLQRPQLSKVKRKKPRGLF

SEQ ID NO: 49510 - protein, 85 aa, Homo sapiens
LLLVLKTQWPFDPEFWDWKTLKRQCLALMGEEASIVSSIDELNDSEVYEKVVDYQEESKETSMNGLSGGVGANSGLLKDIGDEKQ

SEQ ID NO: 49511 - protein, 85 aa, Homo sapiens
LHTVCHPNTLLTNQNRTSNSKTSSIEECSSLPVFPTNDLLLKTVENGLCSSSFPNSGGPSQNFTSNSSRVSVISGPQNTRSSHLN

SEQ ID NO: 49512 - protein, 85 aa, Homo sapiens
LPAQMEDLTKTVLPLNIDSGSDPFLPLPAESSSMSLFPSPADSGTNSVFSQLENNTNHYSSQIEGNTNSSFLKGGNGENAVFPSQ

SEQ ID NO: 49513 - protein, 85 aa, Homo sapiens
LETAGIPSTFEGAEMLSHVSTGCVSDASQVNATVMPNPTVPPLLHTVCHPNTLLTNQNRTSNSKTSSIEECSSLPVFPTNDLLLK

SEQ ID NO: 49514 - protein, 85 aa, Homo sapiens
LRDTMKSWNDSQSDLCSTDQEEEEEMIFGENEDDLDEMMDLSDLPTSLFACSVHEAVFEAREQKERFEALFTIYDDQVTFQLFKS

SEQ ID NO: 49515 - protein, 84 aa, Homo sapiens
LAFRPTGWTHSNKFTRIADVIPQTKGNISIYGIPYSEHSSYLEMKRFVQWLKPQKIIPTVNVGTWKSRSTMEKYFREWKLEAGY

SEQ ID NO: 49516 - protein, 85 aa, Homo sapiens
LSQPISQNNESTLPYDLACTGGDFVLFPPALAGKLAASVHQATKAKPDEPEFHSAQSNKQKQVIEESSVYNQVSLPLVKSLMLKP

SEQ ID NO: 49517 - protein, 85 aa, Homo sapiens
LGHSSSTGDTGFSCSQDSGTDMMLLEDYTSDDNPPSHCTCPPKRRSSVTFEDEVEQIKEAAKNSILHVKAEVHKSLDSYAASLAK

SEQ ID NO: 49518 - protein, 85 aa, Homo sapiens
LRGPTSADETAKKIQYLIHCQWCEERIFQKDGNMVEENPYRQLPCNCHGSMPGKTAIELGPLWSSSLFNTGFLKRMLFESLHHGL

SEQ ID NO: 49519 - protein, 85 aa, Homo sapiens
LGGCQLGFGAPSSLNKNNMPVQWNEVSSGTVDALASQVKPPPFPQGNLAVVQQKPAFGQYPGYSPQGLQASPGGLDSTQPHLQPR

SEQ ID NO: 49520 - protein, 85 aa, Homo sapiens
LRPASPLALTQEQLADLKEDLDRDDCKQEAEVVIYETNCHWEDCTKEYDTQEQLVHHINNEHIHGEKKEFVCRWQACTREQKPFK

SEQ ID NO: 49521 - protein, 85 aa, Homo sapiens
LFSGSRPPSQVSRSGEFPVSDYFSLLSGSCPSSPLPSPAPSVAGSVASSSGSLRHRRPLISPARLNLKGQKLLLFPSPPGEAPTT

SEQ ID NO: 49522 - protein, 84 aa, Homo sapiens
LLAMLLAGRIRLRRIDAFCTCLWALLLGLHLAEQHLQAASPSWLDTLKFSTTSLCCLVGFTAAVATRKATGPRRFRPRRSEKQP

SEQ ID NO: 49523 - protein, 20 aa, Homo sapiens
LSSPRLTARRAGTCRIACRR

SEQ ID NO: 49524 - protein, 85 aa, Homo sapiens
LQLCRTCTGTTALQTACFLHSLPPISPSRSLSPSGASGQDETPRLVWTPSPWSGITTMTSVGTWSLQCPELCPLRMKKVRMTKIS

SEQ ID NO: 49525 - protein, 85 aa, Homo sapiens
LAPPLCLLGDDPTSSFETVQINVIPTSDDSSDVQTKIEPVSPCSSVNSEASLLSADSSSQAFIGEEVLEVKTESLSPSGCLLWDV

SEQ ID NO: 49526 - protein, 85 aa, Homo sapiens
LLDPEDVNMEAPDEKSIITYVVSFYHYFSKMKALAVEGKRIGKVLDQVLEVGKIIERYEELAAELLAWIHRTVGLISNQKFANSL

SEQ ID NO: 49527 - protein, 85 aa, Homo sapiens
LELLAQRFDHKVAMRESWLNENQRLVSQDNFGYELPAVEAAMKKHEAIEADIAAYEERVQGVAELAQALAAEGYYDIRRVAAQRD

SEQ ID NO: 49528 - protein, 85 aa, Homo sapiens
LQVRVVEAEQLFAEVTEVAALRRQWLRDALAVYRMFGEVHACELWIGEKEQWLLSMRVPDSLDDVEVVQHRFESLDQEMNSLMGR

SEQ ID NO: 49529 - protein, 85 aa, Homo sapiens
LDAAFQVEQYYFDVAEVEAWLGEQELLMMSEDKGKDEQSTLQLLKKHLQLEQGVENYEESIAQLSRQCRALLEMGHPDSEQISRR

SEQ ID NO: 49530 - protein, 85 aa, Homo sapiens
LLKKHLQLEQGVENYEESIAQLSRQCRALLEMGHPDSEQISRRQSQVDRLYVALKELGEERRVALEQQYWLYQLSRQVSELEHWI

SEQ ID NO: 49531 - protein, 85 aa, Homo sapiens
LLAASRELHKFFSDARELQGQIEEKRRRLPRLTTPPEPRPSASSMQRTLRAFEHDLQLLVSQVRQLQEGAAQLRTVYAGEHAEAI

SEQ ID NO: 49532 - protein, 85 aa, Homo sapiens
LPAGPSLPQPRELPPGRLPNGLELPERTPRPDRPRARDRPKPRRRPRPREGGEGGGSRRSRSAPAQGGSAPAPPPPPTHTVQHEG

SEQ ID NO: 49533 - protein, 85 aa, Homo sapiens
LSSGSGGGSASASDDDADDADGALAAESTPFLGLRGAHDALRSDSPPLCPAADSRTYYSLDSHSTRASSRHSRGPPPRAKQDSAP

SEQ ID NO: 49534 - protein, 84 aa, Homo sapiens
LDPDTAHPALMLSPDRRGVRLAERRQEVADHPKRFSADCCVLGAQGFRSGRHYWEEPKEPSWPPAQPSLTYYVCPTDRPEFSFT

SEQ ID NO: 49535 - protein, 85 aa, Homo sapiens
LLQASEEVGALEYNPSSQPPASPSTQEAIQGMLSMANLQASDSCLQTTWGAGQAKGSSLAAHGARKNGGGSGKSAGKRLLKRAAK

SEQ ID NO: 49536 - protein, 84 aa, Homo sapiens
LAGLLLVMGPPMLQEISNLFLILLMMGAIFTLAALKESLSTCIPAIVCLGFLLLLNVGQLLAQTKKVVRPTRKKTLSTFKESWK

SEQ ID NO: 49537 - protein, 85 aa, Homo sapiens
LLSLLVLAESKLKSWIIKYGRRESVEQLLQNYVSFIENSKFFEQYEVTYQILKQTAEMYVKADGSVEEAENVMKFMNETTAQWRN

SEQ ID NO: 49538 - protein, 85 aa, Homo sapiens
LKIDVEKNRFLASVEECRTELDRETKLMPQEGSEKIIKEHRVFFSDKGPHHLCEKRLQLIEELCVKLPVRDPVRDTPGTCHVTLK

SEQ ID NO: 49539 - protein, 85 aa, Homo sapiens
LQNEVVSQASFYSKLLQLKESLFSVASKDDVKMMKLHLEQLDERWRDLPQIINKRINFLQSVVAEHQQFDELLLSFSVWIKLFLS

SEQ ID NO: 49540 - protein, 85 aa, Homo sapiens
LQEQARTYLDLLCSMCDLSNASVKTTAKDIQQTEQTIEQKLVQAQNLTQGWEEIKHLKSELWIYLQDADQQLQNMKRRHSELELN

SEQ ID NO: 49541 - protein, 85 aa, Homo sapiens
LKRQTEQRVSLLEDTTSAYQEHEKMCQQLERQLKSVKEEQSKVNEETLPAEEKLKMYHSLAGSLQDSGIVLKRVTIHLEDLAPHL

SEQ ID NO: 49542 - protein, 85 aa, Homo sapiens
LGRLSLLDSVVNQRCHQMKERLQQILNFQNDLKVLFTSLADNKYIILQKLANVFEQPVAEQIEAIQQAEDGLKEFDAGIIELKRR

SEQ ID NO: 49543 - protein, 85 aa, Homo sapiens
LVEENEDRLIDRITLYQHLKSSLNEYQPKLYQVLDDGKRLLISISCSDLESQLNQLGECWLSNTNKMSKELHRLETILKHWTRYQ

SEQ ID NO: 49544 - protein, 85 aa, Homo sapiens
LKIEETWRLWQKFLDDYSRFEDWLKSSERTAAFPSSSGVIYTVAKEELKKFEAFQRQVHECLTQLELINKQYRRLARENRTDSAC

SEQ ID NO: 49545 - protein, 85 aa, Homo sapiens
LVKQSWDRVTSRLFDWHIQLDKSLPAPLGTIGAWLYRAEVALREEITVQQVHEETANTIQRKLEQHKDLLQNTDAHKRAFHEIYR

SEQ ID NO: 49546 - protein, 85 aa, Homo sapiens
LKACDELTDILPEQEQQGLQEAVRKLHKQWKDLQGEAPYHLLHLKIDVEKNRFLASVEECRTELDRETKLMPQEGSEKIIKEHRV

SEQ ID NO: 49547 - protein, 85 aa, Homo sapiens
LHSKVNDLKELTKNLETPPDLQFIEADLMQKLEHAKEITEVAKGTLKDFTAQSTQVEKFINDITTWFTKVEESLMNCAQNETCEA

SEQ ID NO: 49548 - protein, 85 aa, Homo sapiens
LKKVKDIQKELQSQQSNISSTQENLNSLCRKYHSAELESLGRAMTGLIKKHEAVSQLCSKTQASLQESLEKHFSESMQEFQEWFL

SEQ ID NO: 49549 - protein, 85 aa, Homo sapiens
LSKTEKMVHESSNRLYDLPAKRREQQKLQSVLEEIHCYEPQLNRLKEKAQQLWEGQAASKSFRHRVSQLSSQYLALSNLTKEKVS

SEQ ID NO: 49550 - protein, 85 aa, Homo sapiens
LDPLIKPTGKEDLEQKVASLELRSQRMSRDSGAQVDLLQRCTAQWHDYQKAREEVIELMNDTEKKLSEFSLLKTSSSHEAEEKLS

SEQ ID NO: 49551 - protein, 85 aa, Homo sapiens
LAEGTEDLDGELLPTPSAHPSVVMMTAGRCHTLLSPVTEESGEEGTNSEISSPPACRSPSPVANTDASVNQDIAYYQALSAERLQ

SEQ ID NO: 49552 - protein, 85 aa, Homo sapiens
LKRAHKRGVELEYILETWSHLDEDQQELSRQLEVVESSIPSVGLVEENEDRLIDRITLYQHLKSSLNEYQPKLYQVLDDGKRLLI

SEQ ID NO: 49553 - protein, 85 aa, Homo sapiens
LISSQTTERFSKLQSFLLQHQTFLEKCETWMEFLVQTEQKLAVEISGNYQHLLEQQRAHELFQAEMFSRQQILHSIIIDGQRLLE

SEQ ID NO: 49554 - protein, 85 aa, Homo sapiens
LNEWAVFSEKNKELCEWLTQMESKVSQNGDILIEEMIEKLKKDYQEEIAIAQENKIQLQQMGERLAKASHESKASEIEYKLGKVN

SEQ ID NO: 49555 - protein, 85 aa, Homo sapiens
LCEVLLHDCDACATDAECDSIQQATRNLDRRWRNICAMSMERRLKIEETWRLWQKFLDDYSRFEDWLKSSERTAAFPSSSGVIYT

SEQ ID NO: 49556 - protein, 85 aa, Homo sapiens
LLQDALMQCQGFHEMSHGLLLMLENIDRRKNEIVPIDSNLDAEILQDHHKQLMQIKHELLESQLRVASLQDMSCQLLVNAEGTDC

SEQ ID NO: 49557 - protein, 85 aa, Homo sapiens
LELEDQERHFLQQATQVNAWDRTLIENGEKITSLHREVEKVKLDQKRLDQELDFILSQQKELEDLLSPLEELVKEQSGTIYLQHA

SEQ ID NO: 49558 - protein, 85 aa, Homo sapiens
LDQKRLDQELDFILSQQKELEDLLSPLEELVKEQSGTIYLQHADEEREKTYKLAENIDAQLKRMAQDLKDIIEHLNTSGAPADTS

SEQ ID NO: 49559 - protein, 85 aa, Homo sapiens
LFDYDRTRDSCLPSQGLSFSYGDILHVINASDDEWWQARLVTPHGESEQIGVIPSKKRVEKKERARLKTVKFHARTGMIESNRSI

SEQ ID NO: 49560 - protein, 85 aa, Homo sapiens
LRLICIYFSNTHFFKDENNSSLLNNYVLGAQLSHGHVNNLRDPVNISFWHNQSLEGYTLTCVFWKEGARKQPWGGWSPEGCRTEQ

SEQ ID NO: 49561 - protein, 85 aa, Homo sapiens
LLSPAFAMSPVPGSACTALAAALHYALLSCLTWMAIEGFNLYLLLGRVYNIYIRRYVFKLGVLGWGAPALLVLLSLSVKSSVYGP

SEQ ID NO: 49562 - protein, 85 aa, Homo sapiens
LLATLLLLLLGGALAHPDRIIFPNHACEDPPAVLLEVQGTLQRPLVRDSRTSPANCTWLILGSKEQTVTIRFQKLHLACGSERLT

SEQ ID NO: 49563 - protein, 85 aa, Homo sapiens
LNDAYNWEFLIWETALLLFLLRLASLGSETNKKYSNVSILLTEQINLYLKMEKKPNKKEQLTLVNNVLKLSTKLLKELDTPFRLY

SEQ ID NO: 49564 - protein, 85 aa, Homo sapiens
LLSSNIQQHQKQHCGEKPLKRQEGRVPVLRSCKVHLSEKSLQSREVGKALLISSGVLKHQVTHTGEKSHRSSKSREAFHAGKRHY

SEQ ID NO: 49565 - protein, 85 aa, Homo sapiens
LLDDAQRLLYRNVMLENFTLLASLGCWHGAEAEEAPEQIASVGLLSSNIQQHQKQHCGEKPLKRQEGRVPVLRSCKVHLSEKSLQ

SEQ ID NO: 49566 - protein, 85 aa, Homo sapiens
LQNNLVELYSLNPSLPTPQPVRTSRITIGGHRSDVRTLSFSSDNIAVLSAAADSIKIWNRSTLQCIRTMTCEYALCSFFVPGDRQ

SEQ ID NO: 49567 - protein, 85 aa, Homo sapiens
LVMKDSAVNAICYGAKIMLPGVLRYEDGIEVNQEIVVITTKGEAICMAIALMTTAVISTCDHGIVAKIKRVIMERDTYPRKWGLG

SEQ ID NO: 49568 - protein, 85 aa, Homo sapiens
LDICLEKRVGTTLAAPKCNSSTVRFQGLAEGTKGTMKMDMEDADMTLWTEAEFEEKCTYIVNDHPWDSGADGGTSVQAEASLPRN

SEQ ID NO: 49569 - protein, 85 aa, Homo sapiens
LLFKYATNSEEVIGVMSKEYIPKGTRFGPLIGEIYTNDTVPKNANRKYFWRIYSRGELHHFIDGFNEEKSNWMRYVNPAHSPREQ

SEQ ID NO: 49570 - protein, 85 aa, Homo sapiens
LFEEASQVVERRQLALSHLAEFLQSHASLSGILRQLRQTVEATNSMNKNESDLIEKDLNDALQNAKALESAAVSLDGILSKAQYH

SEQ ID NO: 49571 - protein, 85 aa, Homo sapiens
LKIGSSEQRTSCRATADQLCGEVERIQNLLGTKQSEADALAVLKKAFQDQKEELLKSIEDIEERTDKERLKEPTRQALQQRLRVF

SEQ ID NO: 49572 - protein, 85 aa, Homo sapiens
LRVSLSIWDDVLSTRDEIEGWSNNCVPQMAENISNLDNHLRAEELLKEFESEVKNKALRLEELHSKVNDLKELTKNLETPPDLQF

SEQ ID NO: 49573 - protein, 85 aa, Homo sapiens
LSKGELLSTLLTKEKAKGIQAKVTAAKEDWKNFHSNLHQKESALENLKIQMKDFEVSAEPIQDWLSKTEKMVHESSNRLYDLPAK

SEQ ID NO: 49574 - protein, 85 aa, Homo sapiens
LEKCETWMEFLVQTEQKLAVEISGNYQHLLEQQRAHELFQAEMFSRQQILHSIIIDGQRLLEQGQVDDRDEFNLKLTLLSNQWQG

SEQ ID NO: 49575 - protein, 85 aa, Homo sapiens
LELEDSAALSDLHWHDRSADSLLSPQPSSNLSLSLAQPLRSERSGRDTPASVDSIPLEWDHDYDLSRDLESAMSRALPSEDEEGQ

SEQ ID NO: 49576 - protein, 85 aa, Homo sapiens
LKKAFQDQKEELLKSIEDIEERTDKERLKEPTRQALQQRLRVFNQLEDELNSHEHELCWLKDKAKQIAQKDVAFAPEVDREINRL

SEQ ID NO: 49577 - protein, 85 aa, Homo sapiens
LAHGTIAWNSASQLREQYILHQTLLEESKEIDSELEAMTEKLQYLTSVYCTEKMSQQVAELGRETEELRQMIKIRLQNLQDAAKD

SEQ ID NO: 49578 - protein, 85 aa, Homo sapiens
LSQMNGRWDRVCSLLEEWRGLLQDALMQCQGFHEMSHGLLLMLENIDRRKNEIVPIDSNLDAEILQDHHKQLMQIKHELLESQLR

SEQ ID NO: 49579 - protein, 84 aa, Homo sapiens
LKKMWTQTCQAAWGRVKRSPCLLRLCPARWPRPQCHPEEIPLAASPASSWVSSDCPERCRSVCFLHACELHNLSLTVHLLDLFH

SEQ ID NO: 49580 - protein, 84 aa, Homo sapiens
LVEIEDLPASHFRNVIFDITPGDEAGKFEVNAKFLGVDMERFQLHYQDLLQLQYEGVAVMKLFNKAKVNVNLLIFLLNKKFLRK

SEQ ID NO: 49581 - protein, 85 aa, Homo sapiens
LMSRRQACTAQTPEPLRRHRSLTAHSLLPLAEKQRRVLRNLRRLEALGLVSARNGYQGLVDELAKDIRNQHRHRHRRKAELVKLQ

SEQ ID NO: 49582 - protein, 85 aa, Homo sapiens
LQQSIGETNVERKAKKKSSSSSSSDSSASDSSSESEETSTSSSSEDSDTDESSSSSSSSASSTTSSSSSDSDSDSSSSSSSSTST

SEQ ID NO: 49583 - protein, 85 aa, Homo sapiens
LGNGVSDDLSSEEDGEARTQMILLRRSVEGASSDNGCEVKNRKSILSRHLNSQVKKTTTRWCHIVRDSDSLAESEFESAAFSQGS

SEQ ID NO: 49584 - protein, 85 aa, Homo sapiens
LSTSSSFSSAASISFGCAHSTSTSFSSEASISFGGMPCTSASFSGGVSSSFSGPLSTSATFSGGASSGFGGTLSTTAGFSGVLST

SEQ ID NO: 49585 - protein, 84 aa, Homo sapiens
LNASDVLSAMEEMEFQRFVTPLKEALEAYRREQKGKKEASEQKKKDKDKKTDSEEQDKSRDEDNDEDEERLEEEEQNEEEEVDN

SEQ ID NO: 49586 - protein, 85 aa, Homo sapiens
LSRESIPLNDLKSEVSPRISAEDLIDLCELTVTGHFKTPSKKTKSSKPKLLVVDIRNSEDFIRGHISGSINIPFSAAFTAEGELT

SEQ ID NO: 49587 - protein, 85 aa, Homo sapiens
LVVGIVCVVAYCKTKKQRKQMHNHLRQNMCPAHQNRSLANGPSHPRLDPEEIQMADYISKNVPATDHVIRRETETTFSGSHSCSP

SEQ ID NO: 49588 - protein, 84 aa, Homo sapiens
LFMLQKKSVHKKNTIYEIQDNTGSMDVVGSGKWHNIKCEKGDKLRLFCLQLRTVDRKLKLVCGSHSFIKVIKAKKNKEGPMNVN

SEQ ID NO: 49589 - protein, 85 aa, Homo sapiens
LGIPRLLDPEDVDVDKPDEKSIMTYVAQFLKHYPDIHNASTDGQEDDREDRVIFKEMKVWIEQFERDLTRAQMVESNLQDKYQSF

SEQ ID NO: 49590 - protein, 85 aa, Homo sapiens
LEDSAALSDLHWHDRSADSLLSPQPSSNLSLSLAQPLRSERSGRDTPASVDSIPLEWDHDYDLSRDLESAMSRALPSEDEEGQDD

SEQ ID NO: 49591 - protein, 85 aa, Homo sapiens
LLGECSSSIDSVKRLEHKLKEEEESLPGFVNLHSTETQTAGVIDRWELLQAQALSKELRMKQNLQKWQQFNSDLNSIWAWLGDTE

SEQ ID NO: 49592 - protein, 84 aa, Homo sapiens
LTVHRRSHTGERPYKCELCNYACAQSSKLTRHMKTHGQIGKEVYRCDICQMPFSVYSTLEKHMKKWHGEHLLTNDVKIEQAERS

SEQ ID NO: 49593 - protein, 85 aa, Homo sapiens
LGLMVGGPDPDLLTCGQCQMNFPLGDILVFIEHKRKQCGGSLGACYDKALDKDSPPPSSRSELRKVSEPVEIGIQVTPDEDDHLL

SEQ ID NO: 49594 - protein, 85 aa, Homo sapiens
LAGNSSTPPPVSPGRGNPMHRLLNPFQPSPKSPFLSTPPLPPMPPGGTPPPQPPAKSKSCEFCGKTFKFQSNLIVHRRSHTGEKP

SEQ ID NO: 49595 - protein, 85 aa, Homo sapiens
LRDHPGFGEGRLPGTPPLFSPPPRHHLDPHRLSAEEMGLVAQHPSAFDRVMRLNPMAIDSPAMDFSRRLRELAGNSSTPPPVSPG

SEQ ID NO: 49596 - protein, 85 aa, Homo sapiens
LVSKGTLVQTKGTGASGSFKLNKKAASGEAKPKVKKAGGTKPKKPVGAAKKPKKAAGGATPKKSAKKTPKKAKKPAAATVTKKVA

SEQ ID NO: 49597 - protein, 85 aa, Homo sapiens
LPKAFKIIPALSNWEQILYVTEPEAWTAAAMYQATRIFASNLKERMAQRFYNLVLLPRVRDDVAEYKRLNFHLYMALKKALFKPG

SEQ ID NO: 49598 - protein, 85 aa, Homo sapiens
LAGLKELFQTPVCTDKPTTHEKTTKIACRSQPDPVDTPTSSKPQSKRSLRKVDVEEEFFALRKRTPSAGKAMHTPKPAVSGEKNI

SEQ ID NO: 49599 - protein, 85 aa, Homo sapiens
LGKVGVKEELLAVGKLTQTSGETTHTHTEPTGDGKSMKAFMESPKQILDSAASLTGSKRQLRTPKGKSEVPEDLAGFIELFQTPS

SEQ ID NO: 49600 - protein, 85 aa, Homo sapiens
LVLSNLSYSATEETLQEVFEKATFIKVPQNQNGKSKGYAFIEFASFEDAKEALNSCNKREIEGRAIRLELQGPRGSPNARSQPSK

SEQ ID NO: 49601 - protein, 85 aa, Homo sapiens
LLRLKHLSLKNSITHGSFSGSLQGYPSSGAKSLQSVSSISDLNFQNQDENMPSQYLAQLAAKPFFCELQGCKYEFVTREALLMHY

SEQ ID NO: 49602 - protein, 85 aa, Homo sapiens
LPALGAGAAAGSAAAAAAAAPGPAGAASPHPPAVGGAPGPGPAGPGGLHAGAPAAGHSLFSLPVPSLLGSVASRLSSAPLTMAGS

SEQ ID NO: 49603 - protein, 85 aa, Homo sapiens
LLTQAMTELSQTLTTDYRTPQGDYQRIQYIPVSQSASGLQQPQHIQLQVVQVASATSPHQSQQSTVDVGQLHDPQPYPQHAIQVQ

SEQ ID NO: 49604 - protein, 85 aa, Homo sapiens
LQLVCNALLAQEDPLPLAFFVHDAEIVSSLGKTLESQAVETEKVLDIIYQPQAIFRVRAVTRCTSSLEGHSEAVISVAFSPTGKY

SEQ ID NO: 49605 - protein, 85 aa, Homo sapiens
LASGSGDTTILLWDPSTGKQVGRTLAGHSKWITGLSWEPLHANPECRYVASSSKDGSVRIWDTTAGRCERILTGHTQSVTCLRWG

SEQ ID NO: 49606 - protein, 85 aa, Homo sapiens
LESPGLSKVLRTGAFAYPFLFDNLPLFYRLGLCWGRGHGCGQEALSTSHGYHLFCALLTGFLFASHLPERLAPGRFDYIGHSHQL

SEQ ID NO: 49607 - protein, 85 aa, Homo sapiens
LPLGSGHTPQSSSNSEKNSLPPVMAISNVENEKQVHISFLPANTQGFPLAPERGLFHASLGIAQLSQAGPSKSDRGSSQVSVTST

SEQ ID NO: 49608 - protein, 85 aa, Homo sapiens
LRVVSWNINGIRRPLQGVANQEPSNCAAVAVGRILDELDADIVCLQETKVTRDALTEPLAIVEGYNSYFSFSRNRSGYSGVATFC

SEQ ID NO: 49609 - protein, 85 aa, Homo sapiens
LAFHPARDLLAAGDVDGDVFVFSYSCQEGETKELWSSGHHLKACRAVAFSEDGQKLITVSKDKAIHVLDVEQGQLERRVSKAHGA

SEQ ID NO: 49610 - protein, 85 aa, Homo sapiens
LDVANGYSEHFVEFVKDVRKRFPQHTIMAGNVVTGEMVEELILSGADIIKVGIGPGSVCTTRKKTGVGYPQLSAVMECADAAHGL

SEQ ID NO: 49611 - protein, 85 aa, Homo sapiens
LQKLDPLEQAKVDLVSAYTLNSMFWVYLATQGVNPKEHPVKQELERIRVYMNRVKEITDKKKAGKLDRGAASRFVKNALWEPKSK

SEQ ID NO: 49612 - protein, 85 aa, Homo sapiens
LGNFASNISGGQMYGPGAPLGGAPAAANFNRQHFSPLSLLTPCSSASNDSSAQSVSSGVRAPSPAPSSVPLGSEKPSNVSQDRKV

SEQ ID NO: 49613 - protein, 84 aa, Homo sapiens
LAKCKIDTHNIIVNQLVFPDPEKPCKMCEARHKIQAKYLDQMEDLYEDFHIVKLPLLPHEVRGADKVNTFSALLLEPYKPPSAQ

SEQ ID NO: 49614 - protein, 85 aa, Homo sapiens
LTFEQIRKLNPAANHRLRNDFPDEKIPTLREAVAECLNHNLTIFFDVKGHAHKATEALKKMYMEFPQLYNNSVVCSFLPEVIYKM

SEQ ID NO: 49615 - protein, 85 aa, Homo sapiens
LITPAEPSNPWISDDVALWDIEMSKEPSQQRVKRWGFSFDEILKDQVGRDQFLRFLESEFSSENLRFWLAVQDLKKQPLQDVAKR

SEQ ID NO: 49616 - protein, 85 aa, Homo sapiens
LTLFCGAPPVTPIIVLSIINFFERLCLTWMFFFMMCVAERTYKQRFLFAKLFSHITSARKARKYEIPHFRLKKVENIKIWLSLRS

SEQ ID NO: 49617 - protein, 85 aa, Homo sapiens
LPEEGEGGKPWRVDDSEGSWIPPGEKEHGQESLSDELQETHPKKPWQKVTVRARELGDPIAHPRHEADEKPFICAQCGKTFNNTS

SEQ ID NO: 49618 - protein, 85 aa, Homo sapiens
LPLEDLTRINEEIEKFDISDNADRLEDVEDDISVISVVEKEILAVVRKEKEETGLKVSLQRNMGNGLLSSGCSLYESSDLPLMKL

SEQ ID NO: 49619 - protein, 85 aa, Homo sapiens
LKVHLRVHSGERPFKCQTCNKGFTQLAHLQKHYLVHTGEKPHECQVCHKRFSSTSNLKTHLRLHSGEKPYQCKVCPAKFTQFVHL

SEQ ID NO: 49620 - protein, 85 aa, Homo sapiens
LEMICNLESEGDEKSALVLCTAFLSRQLQQGDMYCAWELTLFWSKLQQRVEPSIQVYLERCRQLSLLTKTVYHIFFLIKVINSET

SEQ ID NO: 49621 - protein, 85 aa, Homo sapiens
LCSDHPEIGIKGSFKQTYLVCLCTSSPNGKLIEEISEVDCKDALEMICNLESEGDEKSALVLCTAFLSRQLQQGDMYCAWELTLF

SEQ ID NO: 49622 - protein, 85 aa, Homo sapiens
LQISEDNVIQNFEKTLEIIKTAMNSQILEVKSGSQGAGETSQNAQINYNIQLPSVNTVQNNKLPDSSPFSSFISVMPTKSNIPQS

SEQ ID NO: 49623 - protein, 85 aa, Homo sapiens
LKEFRCQVSDCSRIFQAITGLIQHYMKLHEMTPEEIESMTASVDVGKFPCDQLECKSSFTTYLNYVVHLEADHGIGLRASKTEED

SEQ ID NO: 49624 - protein, 85 aa, Homo sapiens
LTQRCNAQRMMIAEAYQSMYGRDLIGDMREQLSDHFKDVMAGLMYPPPLYDAHELWHAMKGVGTDENCLIEILASRTNGEIFQMR

SEQ ID NO: 49625 - protein, 84 aa, Homo sapiens
LHIFNAKKAAAHYKCMLFSSGTVQLTTTSRAEFGDFDIKTVLQEIKRGKRMVCSFYICYATLHLICCFKFRVHPKFIQSSENLK

SEQ ID NO: 49626 - protein, 85 aa, Homo sapiens
LLSDAAILRSQQIRTSRQQEVNLQTRCYDLQKEVLDLQCLVEALGLKLQKAVTEMDNYKEMLMNKSNEADDCQRELKKLKFESII

SEQ ID NO: 49627 - protein, 85 aa, Homo sapiens
LQETLRQKLLSDDNWKEKIEAELAKERAQHLVEFEEQALLFKEETKLQLDIEKEKHQDVIQKYKKEQEELQMKISDLITGATRDL

SEQ ID NO: 49628 - protein, 85 aa, Homo sapiens
LAGVQWCNLGSLQPPPPRFKRFSCLSLLSSWDYRPHQQLNALVRLLQWKELGQLVELLLHSTVQLLELNLPQTNVADTNKLQCLV

SEQ ID NO: 49629 - protein, 85 aa, Homo sapiens
LADRMEDLTNPEDIRTNIKCDRKVSLYGYLRGAHLKNKSQIHMPGVGDFAVSDISFLPDPCALPEQQKKRCLNEKEKLVYAPLSG

SEQ ID NO: 49630 - protein, 85 aa, Homo sapiens
LDVGAGTGILSIFCAQAGARRVYAVEASAIWQQAREVVRFNGLEDRVHVLPGPVETVELPEQVDAIVSEWMGYGLLHESMLSSVL

SEQ ID NO: 49631 - protein, 85 aa, Homo sapiens
LEDRVHVLPGPVETVELPEQVDAIVSEWMGYGLLHESMLSSVLHARTKWLKEGGLLLPASAELFIAPISDQMLEWRLGFWSQVKQ

SEQ ID NO: 49632 - protein, 85 aa, Homo sapiens
LPPLIDPWDPGLTARDLLFRGGCRYRKRPRVVLDVTEQISRFLLDHGDVAFAPLGKLMLENFKLEGAGSRTKKKTVVSVKKLLQD

SEQ ID NO: 49633 - protein, 84 aa, Homo sapiens
LPLPPTTPPSQELTPDACAQGVPSEQRQMLRDYMAKLPPQRDTPGCATTPPHSQASSVRATRSQQHTPVLSSSQPLRKKPRMGF

SEQ ID NO: 49634 - protein, 85 aa, Homo sapiens
LLAVRSDYHCAVWKFGKQWQPTLLQAMQVEKGATGISLSPHLPGELAICSRSGAVCLWSPEDGLRQIYRDPETLVFRDSSSWRWA

SEQ ID NO: 49635 - protein, 85 aa, Homo sapiens
LAPPVWTAPTFTHRQMLGSTELRREEEEGQRLGVLRKAMARGQLLLQRDLGSLPAAEPPPAPESGLEDKLSERLGEAWAGRGAAW

SEQ ID NO: 49636 - protein, 85 aa, Homo sapiens
LVIVSLMELFKDITPSYKIRPLTEAEKSTKTRKETQKLREFEEGLVSQYKFYLENLEQMVKDWKQRKLKKSNVVSLKAYKGLAEV

SEQ ID NO: 49637 - protein, 85 aa, Homo sapiens
LRGIFPECAYGTRYLDDLCVKILREDKNCPGSTQLVKWMLGCYDALQKKYLRMVVLAVYTNPEDPQTISECYQFKFKYTNNGPLM

SEQ ID NO: 49638 - protein, 85 aa, Homo sapiens
LQLDLGETGQQVDPDQPKKQKILVEEMAPLKGVQEQQVRHECEVTKPEKEKGEETRIENGKLIVVTDSCGRVESSGKISEPMEAH

SEQ ID NO: 49639 - protein, 85 aa, Homo sapiens
LENFTLLASLGLASSKTHEITQLESWEEPFMPAWEVVTSAIPRGCWHGAEAEEAPEQIASVGLLSSNIQQHQKQHCGEKPLKRQE

SEQ ID NO: 49640 - protein, 85 aa, Homo sapiens
LQNAALQHLFIRKSFRPFKCLQCGKAFREKDKLDQHLRFHGREGNCPLTCDLCNKGFISSTSLESHMKLHSDQKTYSCIFCPESF

SEQ ID NO: 49641 - protein, 85 aa, Homo sapiens
LSGVNVVYDQRTGRSRGFAFVYFERIDDSKEAMERANGMELDGRRIRVDYSITKRAHTPTPGIYMGRPTHSGGGGGGGGGGGGGG

SEQ ID NO: 49642 - protein, 85 aa, Homo sapiens
LSRAAKDRSATGLERTLAILADKTRQLVTVCDCKLLANSIHGLNAARPDYIASKASPTSTEEEQVMLRNDQDTLMARWTGRNSRS

SEQ ID NO: 49643 - protein, 85 aa, Homo sapiens
LNAARPDYIASKASPTSTEEEQVMLRNDQDTLMARWTGRNSRSSLQVDWHEEEWEKVWLNVDKSLECIIQRVDKLLQKERLHGEG

SEQ ID NO: 49644 - protein, 85 aa, Homo sapiens
LEDMSLGIMDLRNVTFKVTQATSSASADMLPVITGNRDGFNVRVPLPGPLFDALPREIQSGMLLRVQPVLFNVGINEQQTLAERF

SEQ ID NO: 49645 - protein, 85 aa, Homo sapiens
LPYFAAKFNLSVTDASRRLCGFLKSLGVHYVFDTTIAADFSILESQKEFVRRYRQHSEEERTLPMLTSACPGWVRYAERVLGRPI

SEQ ID NO: 49646 - protein, 84 aa, Homo sapiens
LAKKIGKLTELHQQTIRQAENRLSKLNQAASHLEEYNEMLELILKWIEKAKVLAHGTIAWNSASQLREQYILHQVTLGKIIFKK

SEQ ID NO: 49647 - protein, 85 aa, Homo sapiens
LQIIRDLVDKGGDIFLDQLARLGVISKVSTLAGPSSDDENEEESKPEKEDEPQEDAKELQQGKPYHWRDWSIIRGRDCLYIWSDA

SEQ ID NO: 49648 - protein, 85 aa, Homo sapiens
LICTRESGAVFEAGGLNCVLTFIRDSGHLVHKDTLHSAMAVVSRLCGKMEPQDSSLEICVESLSSLLKHEDHQVSDGALRCFASL

SEQ ID NO: 49649 - protein, 6 aa, Homo sapiens
LLLEPI

SEQ ID NO: 49650 - protein, 49 aa, Homo sapiens
LGKIYLAARKKKNFQFLPAAWDFCQRFTKQNIHSSVPPVWIGQFQHLIL

SEQ ID NO: 49651 - protein, 85 aa, Homo sapiens
LLDDAQRLLYRNVMLENFTLLASLGLASSKTHEITQLESWEEPFMPAWEVVTSAIPRGCWHGAEAEEAPEQIASVGLLSSNIQQH

SEQ ID NO: 49652 - protein, 27 aa, Homo sapiens
LGLPSISRQLALVFRIRTDIPPCLAIQ

SEQ ID NO: 49653 - protein, 33 aa, Homo sapiens
LSRQPQTVLPALTALTVGYTQLMEKGWKNLRAP

SEQ ID NO: 49654 - protein, 15 aa, Homo sapiens
LTYLMTKSGSCSYMS

SEQ ID NO: 49655 - protein, 85 aa, Homo sapiens
LSIKGIYYQAEVLGQPIVWITPYAFSHDHPTDVDYRVMATFTEFYTTLLGFVNFRLYQLLNLHYPPKLEGQAQAEAKAGEGTYAL

SEQ ID NO: 49656 - protein, 85 aa, Homo sapiens
LMARDGTREDNHKLHKRWLRHQAFMAELAQNKEWLEKIEREGQQLMQEKPELAASVRKKLGEIRQCWAELESTTQAKARQLFEAS

SEQ ID NO: 49657 - protein, 85 aa, Homo sapiens
LASLRSPEAEAVRRGLEQLQSAWAGLREAAERRQQVLDAAFQVEQYYFDVAEVEAWLGEQELLMMSEDKGKDEQSTLQLLKKHLQ

SEQ ID NO: 49658 - protein, 85 aa, Homo sapiens
LEQGVENYEESIAQLSRQCRALLEMGHPDSEQISRRQSQVDRLYVALKELGEERRVALEQQYWLYQLSRQVSELEHWIAEKEVVA

SEQ ID NO: 49659 - protein, 85 aa, Homo sapiens
LYVALKELGEERRVALEQQYWLYQLSRQVSELEHWIAEKEVVAGSPELGQDFEHVSVLQEKFSEFASETGMAGRERLAAVNQMVD

SEQ ID NO: 49660 - protein, 85 aa, Homo sapiens
LSCSEEFKELMDLPTCGARNLKQHLAKATASGIMGSPKPAIKSISASALLKQQKQRMLEMRRRKSEEIQKRFLQSSSEVESPAVP

SEQ ID NO: 49661 - protein, 85 aa, Homo sapiens
LSGGLTMDLDHSIGTQYSANPPVTIDVPMTDMTSGLMGHSQLTTIDQSELSSQLGLSLGGGTILPPAQSPEDRLSTTPSPTSSLH

SEQ ID NO: 49662 - protein, 85 aa, Homo sapiens
LSLTQMEREKIVWEFEQLYHSLKEHEYRLLARLEELDLAIYNSINGAITQFSCNISHLSSLIAQLEEKQQQPTRELLQDIGDTLS

SEQ ID NO: 49663 - protein, 85 aa, Homo sapiens
LASASFDSTVRLWDIERGVCTHTLTKHQEPVYSVAFSPDGKYLASGSFDKCVHIWNTQSGNLVHSYRGTGGIFEVCWNARGDKVG

SEQ ID NO: 49664 - protein, 85 aa, Homo sapiens
LDYHDDNFAIVFAAMGVRRLSRLVNMETARFFKSDFEQNGTMGNVCLFLNLANDPTIERIITPRLALTTAEFLAYQCEKHVLVIL

SEQ ID NO: 49665 - protein, 85 aa, Homo sapiens
LWSATTTILTSTGCGASWRARCHACTPSRCTRTSAPVPSSPSRWRSSTRRRAGCTPTCAEPSSRSCPRAWAPAQSPPQSPARSWA

SEQ ID NO: 49666 - protein, 85 aa, Homo sapiens
LYCQELKKVIEASDVVLEVLDARDPLGCRCPQVEEAIVQSGQKKLVLILNKSDLVPKENLESWLNYLKKELPTVVFRASTKPKDK

SEQ ID NO: 49667 - protein, 84 aa, Homo sapiens
LAPGAPSAINLDSHSYEITSQNVKDGGRYTFEDAQEHIYKLMKSDSYARFLRSNAYQDLLLAKKKPESEQGRRTSLEKFTRSVG

SEQ ID NO: 49668 - protein, 85 aa, Homo sapiens
LENKRDAFFPPLHQFCTNPKNPVTVIRGLAGALKLDLGLFSTKTLVEANNEHMVEVRTQLLQPADENWDPTGTKKIWRCESNRSH

SEQ ID NO: 49669 - protein, 85 aa, Homo sapiens
LNSGVSQKPDPAKTKNRRKRKPSTSDDSDSNFEKIVSKAVTSKKSKGESDDFHMDFDSAVAPRAKSVRAKKPIKYLEESDEDDLF

SEQ ID NO: 49670 - protein, 85 aa, Homo sapiens
LLRPDTYIGSVELVTQQMWVYDEDVGINYREVTFVPGLYKIFDEILVNAADNKQRDPKMSCIRVTIDPENNLISIWNNGKGIPVV

SEQ ID NO: 49671 - protein, 85 aa, Homo sapiens
LGFLKPFSLMKASSRFKAHQDALPRLPVPPLQQSLDHYLKALQPIVSEEEWAHTKQLVDEFQASGGVGERLQKGLERRARKTENW

SEQ ID NO: 49672 - protein, 85 aa, Homo sapiens
LSGRTALQIGDSLNTEKATLIVVHTDGSIVETTGLKGPAAPLTPGPQSPPTPLAPGQEKGGTKYNWDPSVYDSELPVRCRNISGT

SEQ ID NO: 49673 - protein, 85 aa, Homo sapiens
LYKNRLGSGGRGRCIKQGENWYSPTEFEAMAGRASSKDWKRSIRYAGRPLQCLIQDGILNPHAASCTCAACCDDMTLSGPVRLFV

SEQ ID NO: 49674 - protein, 85 aa, Homo sapiens
LLIRNHLISKGLGETATVLTKEADLPMTAASHSSAFTPVTAAASPVSLPRTPRIANGIATRLGSHAAVGASAPSAPTAHPQPRPP

SEQ ID NO: 49675 - protein, 85 aa, Homo sapiens
LSNSSWSEMSPWVIGTNYTLYPMTPAIEQRLILQYLTPLGEYQELLPIFMQLGSRELMMFYIDLKQTNDVLLTFEALKHLASLLL

SEQ ID NO: 49676 - protein, 85 aa, Homo sapiens
LLLTSATWSQPLSALWGMKSVFDMKHSFTEDHYVEFSKHSQDRVIGTKGDIAHIYDIQTGNKLLTLFNPDLANNYKRNCATFNPT

SEQ ID NO: 49677 - protein, 85 aa, Homo sapiens
LQDRASCLPAMLLDPPPGSHVIDACAAPGNKTSHLAALLKNQGKIFAFDLDAKRLASMATLLARAGVSCCELAEEDFLAVSPSDP

SEQ ID NO: 49678 - protein, 84 aa, Homo sapiens
LVLRRTHLASDDLYKLSMKMPKALKPKKKKNISHDTFGTTYGRIHMQKQDLSKLQTRKMKGLKKRPAERITEDHEKKSKRIKKN

SEQ ID NO: 49679 - protein, 85 aa, Homo sapiens
LEEMGPSLDLVLRRTHLASDDLYKLSMKMPKALKPKKKKNISHDTFGTTYGRIHMQKQDLSKLQTRKMKGLKKRPAERITEDHEK

SEQ ID NO: 49680 - protein, 85 aa, Homo sapiens
LEIRTLAQALSTVEEKKQEEAKMKKKTFKGLIRIFRKGVIAVLAANRLKILGQSCASLFTWMESFKEGIGMLVCTGEPQDKHKFP

SEQ ID NO: 49681 - protein, 85 aa, Homo sapiens
LEDASNEEKACNELDSTKQKIDSHTKNIKELQDKLADVNKELSHLHTKCADREALISTLKVELQNVLHCWEKEKAQAAQSESELQ

SEQ ID NO: 49682 - protein, 85 aa, Homo sapiens
LAANRLKILGQSCASLFTWMESFKEGIGMLVCTGEPQDKHKFPKHQKEQLRCLQALSWLTSSDLLAAIISSMAELQDVIGKADPN

SEQ ID NO: 49683 - protein, 85 aa, Homo sapiens
LKSELHTACLRENASLQSIGSRDHSNLSIPSRAPLPADTTGIGDFLPLKAELDTTYTFLKETFINTVPHALTSSHSSPVTMSANA

SEQ ID NO: 49684 - protein, 85 aa, Homo sapiens
LAGSSGPGASSGTSGDHGELVVRIASLEVENQSLRGVVQELQQAISKLEARLNVLEKSSPGHRATAPQTQHVSPMRQVEPPAKKP

SEQ ID NO: 49685 - protein, 85 aa, Homo sapiens
LADVAAQAAWPPALAPWGLCTHGNQVACHHVTWGIWVNKSSFDQAERAFVEWSQALLLAPDGSRRQGTPNTGQQVAVPDLAHQPS

SEQ ID NO: 49686 - protein, 85 aa, Homo sapiens
LQDLYMAVTTQEVQVGQKHQGAGDPHTSNSASLQGIDSQCVNQPEQLVSSAPTLSAPEKESTALCRDLSCQRSRGRSQGVSSVNL

SEQ ID NO: 49687 - protein, 85 aa, Homo sapiens
LGFVNFRLYQLLNLHYPPKLEGQAQAEAKAGEGTYALDSESCMEKLAALSASLARVVVPATEEEAEVDEFPTDGEMSAQEEDRRK

SEQ ID NO: 49688 - protein, 85 aa, Homo sapiens
LQLEDIYRNCQLSEEDHWIYQAILDQYPGDLFGRRTLYLDMLQRYFPHKSRHDLVEHEKYCDQYRFAIEQQNILISNWNKNKKDF

SEQ ID NO: 49689 - protein, 85 aa, Homo sapiens
LASGSGDTTVRFWDLSTETPHFTCKGHRHWVLSISWSPDGRKLASGCKNGQILLWDPSTGKQVGRTLAGHSKWITGLSWEPLHAN

SEQ ID NO: 49690 - protein, 85 aa, Homo sapiens
LAAIQRLMSHEVVSETAAGNIINMLWQLMENSLEELKLLQTVLVLLTTNTVVHDEALSKAIVLCFRLHFTKDNITNNTAAATVRQ

SEQ ID NO: 49691 - protein, 85 aa, Homo sapiens
LPNVSTPVSDAFKTQMELLQAGLSRTPTRHLLNGSLVDGEPPMKRRRGRRKNVEGLDLLFMSHKRTSLSAEDAEVTKAFEEDIET

SEQ ID NO: 49692 - protein, 85 aa, Homo sapiens
LDILEDYLIQRRYPYERIDGRVRGNLRQAAIDRFSKPDSDRFVFLLCTRAGGLGINLTAADTCIIFDSDWNPQNDLQAQARCHRI

SEQ ID NO: 49693 - protein, 85 aa, Homo sapiens
LGWQDWIIAPEGYAAYYCEGECAFPLNSYMNATNHAIVQTLVHFINPETVPKPCCAPTQLNAISVLYFDDSSNVILKKYRNMVVR

SEQ ID NO: 49694 - protein, 85 aa, Homo sapiens
LLESLKKMQTPPSLPPCPESAGAATTEALSPPKTPSLLPPLGLSQSGPPGLLPSPSFDSKPPTTLLGLIPAPSMVPATDTKAPPT

SEQ ID NO: 49695 - protein, 85 aa, Homo sapiens
LLLHTICLGEKAKEEMHRVEILPPANQEDKKMQPVTIASLQASVLPMVSMVGVQLSPPVTFQLRAGSGPVFLSGQERYEKKAGKR

SEQ ID NO: 49696 - protein, 85 aa, Homo sapiens
LDTLIKFRAHRVVKRKSALGPGVPHIINTKLLKHFTCLTYNNGRLRNLISDSMKAKITAYVIILALHIHDFQIDLTVLQRDLKLS

SEQ ID NO: 49697 - protein, 85 aa, Homo sapiens
LRRHERSHPELRPFPCTQCGKSFSDRAGLRKHSRTHSSVRPYTCPHCPKAFLSASDLRKHERTHPVPMGTPTPLEPLVALLGMPE

SEQ ID NO: 49698 - protein, 85 aa, Homo sapiens
LENFTLLASLGCWHGAEAEEAPEQIASVGLLSSNIQQHQKQHCGEKPLKRQEGRVPVLRSCKVHLSEKSLQSREVGKALLISSGV

SEQ ID NO: 49699 - protein, 85 aa, Homo sapiens
LTVAQIKAGYQSLKKIEDCIRAGQHGRALMEACNEFYTRIPHDFGLRTPPLIRTQKELSEKIQLLEALGDIEIAIKLVKTELQSP

SEQ ID NO: 49700 - protein, 85 aa, Homo sapiens
LHITGRELRSKIAETFGLQENYIKIVINKKQLQLGKTLEEQGVAHNVKAMVLELKQSEEDARKNFQLEEEEQNEAKLKEKQIQRT

SEQ ID NO: 49701 - protein, 85 aa, Homo sapiens
LHGEGCEDVFPCAGSCTSKKDCSPPPEESSPGEWSEALYPLLTTLTDCVAMMSDKAKKAMVFLLMQDSAPTIATYLSLQYRRDVV

SEQ ID NO: 49702 - protein, 85 aa, Homo sapiens
LDEEAILPDQIVCSPVPMLRDLTQNTVVSINFKDPQFAEDYIFKAVMLPGARKPAAVLKPSDWEKSSNGRQWKPQLGFNRDRRPV

SEQ ID NO: 49703 - protein, 85 aa, Homo sapiens
LASCSDDMTLKIWSMKQEVCIHDLQAHNKEIYTIKWSPTGPATSNPNSNIMLASASFDSTVRLWDIERGVCTHTLTKHQEPVYSV

SEQ ID NO: 49704 - protein, 85 aa, Homo sapiens
LTPQKLQHLEQLRANRNNLNPAQKLMLEQLESQFVLMQQHQMRPTGVAQVRSTGIPNGPTADSSLPTNSVSGQQPQLALTRVPSV

SEQ ID NO: 49705 - protein, 85 aa, Homo sapiens
LRDTMKSWNDSQSDLCSTDQEEEEEMIFGENEDDLDEMMDLSDLPTSLFACSVHEAVFEAREQKVQMSGEVRDKSYLLPPQPVKQ

SEQ ID NO: 49706 - protein, 85 aa, Homo sapiens
LLVGANTFASHLLFAVGCPLLLLWPFLCESQGLRKRQQPPGNEADARVRPEEEEEPLMEMRLRDAPQHFYAALLQLGLKYLFILG

SEQ ID NO: 49707 - protein, 85 aa, Homo sapiens
LFRLAVFFSDSFVVAEARATPFLLGSFILLLVVQLHWEGQLLPPKLLTMPRLGTSATTNPPRHNGAYALRLGIGLLLCTRLAGLF

SEQ ID NO: 49708 - protein, 85 aa, Homo sapiens
LQRHFEQHQETCRGDARFVCKADSCGKRLKSKDALKRHQENVHTGDPKKKLICSVCNKKCSSASSLQEHRKIHEIFDCQECMKKF

SEQ ID NO: 49709 - protein, 84 aa, Homo sapiens
LLDIGCGTGLSGSYLSDEGHYWVGLDISPAMLDEAVDREIEGDLLLGDMGQGIPFKPGTFDGCIRSGDPELSCSCTLRTQSSWS

SEQ ID NO: 49710 - protein, 85 aa, Homo sapiens
LELLYLPENKPCYLLDIGCGTGLSGSYLSDEGHYWVGLDISPAMLDEAVDREIEGDLLLGDMGQGIPFKPGTFDGCIRSGDPELS

SEQ ID NO: 49711 - protein, 85 aa, Homo sapiens
LNIHVGNISLVDQFEWDMSEKENSPEKFALKLCSELGLGGEFVTTIAYSIRGQLSWHQKTYAFSENPLPTVEIAIRNTGDADQWC

SEQ ID NO: 49712 - protein, 85 aa, Homo sapiens
LTRVPSVSQPGVRPACPGQPLANGPFSAGHVPCSTSRTLGSTDTILIGNNHITGSGSNGNVPYLQRNALTLPHNRTNLTSSAEEP

SEQ ID NO: 49713 - protein, 85 aa, Homo sapiens
LSFVISELFKGKLYHEEGTQECAMVNPIAWSPESMEKCLQDFCLPFLRITSLLQHHLFGEDLPSCQEEEEFSVLASCLGLLPTFY

SEQ ID NO: 49714 - protein, 85 aa, Homo sapiens
LTPVTPQKSSMATQNLPEQHVSERSQALQQTSATDISSGSISGDIIDELMSSDVFPLLRLSPTPADDYNFNLDDNEGVCDLFDVQ

SEQ ID NO: 49715 - protein, 85 aa, Homo sapiens
LVLGSQKLTQLRDSIRCVSDLQIGGEFSNTPDQAPEHISKDLYKSAFFYFEGTFYNDKRYPECRDLSRTIIEWSESHDRGYGKFQ

SEQ ID NO: 49716 - protein, 85 aa, Homo sapiens
LGIPRLLDPEDVDVDKPDEKSIMTYVAQFLKHYPDIHNASTDGQEDDEILPGFPSFANSVQNFKREDRVIFKEMKVWIEQFERDL

SEQ ID NO: 49717 - protein, 85 aa, Homo sapiens
LESLGRAMTGLIKKHEAVSQLCSKTQASLQESLEKHFSESMQEFQEWFLGAKAAAKESSDRTGDSKVLEAKLHDLQNILDSVSDG

SEQ ID NO: 49718 - protein, 85 aa, Homo sapiens
LQNMKRRHSELELNIAQNMVSQVKDFVKKLQSKQASVNTIIEKVNKLTKKEESPEHKEINHLNDQWLDLCRQSNNLCLQREEDLQ

SEQ ID NO: 49719 - protein, 85 aa, Homo sapiens
LKEVNMRWNNLLEEIAEQLQSSKALLQLWQRYKDYSKQCASTVQQQEDRTNELLKAATNKDIADDEVATWIQDCNDLLKGLGTVK

SEQ ID NO: 49720 - protein, 85 aa, Homo sapiens
LMKGEGEVKLNMAIGKGEQALRSSNKEGQRVIQTQLETLKEVWADIMSSSVHAQSTLESVISQWNDYVERKNQLEQWMESVDQKI

SEQ ID NO: 49721 - protein, 85 aa, Homo sapiens
LELVQDVTLKDKIDQLQSDYQDLCSIGKAMMEEIAGFEDRLNNLQMKGDTLIGQCADHLQAKLKQNVHAHLQGTKDSYSAICSTA

SEQ ID NO: 49722 - protein, 85 aa, Homo sapiens
LERQLKSVKEEQSKVNEETLPAEEKLKMYHSLAGSLQDSGIVLKRVTIHLEDLAPHLDPLAYEKARHQIQSWQGELKLLTSAIGE

SEQ ID NO: 49723 - protein, 85 aa, Homo sapiens
LKTSSSHEAEEKLSEHKALVSVVNSFHEKIVALEEKASQLEKTGNDASKATLSRSMTTVWQRWTRLRAVAQDQEKILEDAVDEWT

SEQ ID NO: 49724 - protein, 85 aa, Homo sapiens
LLLEGKAHTKDEAEQLAGKLRRLKGSLLELQRALHDKQLNMQGTAQEKEESDVDLTATQSPGVQEWLAQARTTWTQQRQSSLQQQ

SEQ ID NO: 49725 - protein, 85 aa, Homo sapiens
LKVNKTLTSLNIESNFITGTGILALVEALKENDTLTEIKIDNQRQQLGTAVEMEIAQMLEENSRILKFGYQFTKQGPRTRVAAAI

SEQ ID NO: 49726 - protein, 85 aa, Homo sapiens
LLIDNAPSHPRALMEIYEEINVIFMPANTTSILQPMDQGVISTFKSYYLRNTFHKALAAMDSDVSDGSGQSKLKTFWKGFTILDA

SEQ ID NO: 49727 - protein, 85 aa, Homo sapiens
LAKSLIKSWKKLLDGPSTEKDLDEKKKEPAITSQNSPEAREESTSSGNVSNRKDETNARDTYVSSFPRAPSTSDSVRLKCREMLA

SEQ ID NO: 49728 - protein, 85 aa, Homo sapiens
LTPVTPQKSSMATQNLPEQHVSERSQALQQTSATDISSAGSISGDIIDELMSSDVFPLLRLSPTPADDYNFNLDDNEGVCDLFDV

SEQ ID NO: 49729 - protein, 85 aa, Homo sapiens
LDSDPSLAVSDVVGHFDDLADPSSSQDGSFSAQYGVQTLDMPVGMTHGLMEQGGGLLSGGLTMDLDHSIGTQYSANPPVTIDVPM

SEQ ID NO: 49730 - protein, 85 aa, Homo sapiens
LANDPTIERIITPRLALTTAEFLAYQCEKHVLVILTDMSSYAEALREVSAAREEVPGRRGFPGYMYTDLATIYERAGRVEDITHP

SEQ ID NO: 49731 - protein, 85 aa, Homo sapiens
LRPKSQELRHFESENIMSPACVVSPHATYSTSIIPNATLSSSSEVIAIPTAQSAGQRESKSSGSSHARIKSRDHLISRHAVKGDP

SEQ ID NO: 49732 - protein, 85 aa, Homo sapiens
LMPRSLSFSGPRYGRSRTPPSAASSRYSMRNRIQSSPMTVISEGEGEAVEPVDSIARGALGAAEGCSLDGLAREEMDEGGLLCGE

SEQ ID NO: 49733 - protein, 85 aa, Homo sapiens
LILYKELYYRHIYAKVSGGPSLEQRFESYYNYCNLFNYILNADGPAPLELPNQWLWDIIDEFIYQFQSFSQYRCKTAKKSEEEID

SEQ ID NO: 49734 - protein, 85 aa, Homo sapiens
LNKKSMYSRVPECQVTTYYYVGFAYLMMRRYQDAIRVFANILLYIQRTKSMFQRTTYKYEMINKQNEQMHALLAIALTMYPMRID

SEQ ID NO: 49735 - protein, 85 aa, Homo sapiens
LRKEESCLLQRATVGLTDGLGDASQLPVAPTGDQPCQALPLLSSQTSVAERLVEQPQLHPDVRTECESGTTSWESDDEEQGPTVP

SEQ ID NO: 49736 - protein, 85 aa, Homo sapiens
LPARGCVRKRTVWPRLARVLIVTLLTLELSYAPLPCQLSGVPYNTGDPVGRWARPCIWPCPWHTTINALKGRISELQWSVMDQEM

SEQ ID NO: 49737 - protein, 85 aa, Homo sapiens
LKKQVESAELKNQRLKEVFQTKIQEFRKACYTLTGYQIDITTENQYRLTSLYAEHPGDCLIFKATSPSGSKMQLLETEFSHTVGE

SEQ ID NO: 49738 - protein, 85 aa, Homo sapiens
LGNFEESLLRGRFAPSGHIEGFTAEIGASGSYCPQHVTLPVTVTFFDVSEQNAPAPFLGIVDLNPLGRKGYSVPKVGTVQVTLFN

SEQ ID NO: 49739 - protein, 85 aa, Homo sapiens
LQWLELPDVAPEELEALSRSMVLHLRRLIDQRDECTELIVDLTQERDYLQAQHPPSPIKSSSADSTPSPTSSLSSEDKQHLAVEL

SEQ ID NO: 49740 - protein, 85 aa, Homo sapiens
LDTLQNVSLQLEGLERDNKQLDAENLELRRLVETMRFTSTKLAQMERENQQLEREKEELRKNVDLLKALGKKSERLELSYQSVSA

SEQ ID NO: 49741 - protein, 85 aa, Homo sapiens
LGAPEALGGRETGSHTLQSPAPPSSHSLARERTPLVGKAGSSCQGPGPRSRPLDTRRFSLAPPKEERLAPLHQSATAPAIATAGA

SEQ ID NO: 49742 - protein, 85 aa, Homo sapiens
LPVITGNRDGFNVRVPLPGPLFDALPREIQSGMLLRVQPVLFNVGINEQQTLAERFGDTSLQEVINVESLVRLNSYFEQFKEVLP

SEQ ID NO: 49743 - protein, 85 aa, Homo sapiens
LFLTARANEDPCWKNEITHDEHCAACKRGANLQPCGTCPGAYHLSCLEPPLKTAPKGVWVCPRCQQKALKKDEGVPWTGMLAIVH

SEQ ID NO: 49744 - protein, 85 aa, Homo sapiens
LSSDRAAAGMVWKPKSCEPIRREGPKWDPARLNESTTFVLGSRANKALGMGGTRGRIYIKHPHLFKAYLLIEEDIRDLAASDDYR

SEQ ID NO: 49745 - protein, 84 aa, Homo sapiens
LLFSQGKMYGYVDTLLTMLAMLLKVAMNRAQVCLISSSKSGERHLYLIKVSRDKISDSNDQESANCDAKGNNFICIMLYKIWLN

SEQ ID NO: 49746 - protein, 85 aa, Homo sapiens
LREKYGDKMLRMQKGDPQVYEELFSYSCPKFLSPVVPNYDNVHPNYHKEPFLQQLKVFSDEVQQQAQLSTIRSFLKLYTTMPVAK

SEQ ID NO: 49747 - protein, 85 aa, Homo sapiens
LAGFLDLTEQEFRIQLLVFKHKMKNLVWTSGISALDGEFQSASEVDFYIDKDMIHIADTKVARRYGDFFIRQIHKFEELNRTLKK

SEQ ID NO: 49748 - protein, 85 aa, Homo sapiens
LILYKELYYRHIYAKVSFQSFSQYRCKTAKKSEEEIDFLRSNPKIWNVHSVLNVLHSLVDKSNINRQLEVYTSGGDPESVAGEYG

SEQ ID NO: 49749 - protein, 85 aa, Homo sapiens
LCEFSDRRLLDKWVELRNIDSFTTTVAHCISVSQDYIFCGCADGTVRLFNPSNLHFLSTLPRPHALGTDIASVTEASRLFSGVAN

SEQ ID NO: 49750 - protein, 85 aa, Homo sapiens
LPPADGRPSRPHSYQNPTTSSMAKISRSISVGENLGLVAEPQAHAPIRVSPLSKLALPSRAHLVLDIPKPLPDRPTLAAFSPVTK

SEQ ID NO: 49751 - protein, 85 aa, Homo sapiens
LKALELLTNCYIMVQGNTVSAIGPFSGLKEVRKVVLDTMKNIHPIYNIKIDKELASGEYFLKANQKKRQKMEAIKAKQAEAISKR

SEQ ID NO: 49752 - protein, 85 aa, Homo sapiens
LVVGNTEIGIEMKFKNMLFPMIVCPAWIPELNSVEHGPDGISFGAACPLSIVEKTLVDAVAKLPAQKTEVFRGVLEQLRWFAGKQ

SEQ ID NO: 49753 - protein, 85 aa, Homo sapiens
LLQLKFEDRLKEESLSLFTILHDRILEIEKHYQQNEDKMRKSFNQQLADAIAVIKGMYQQFFEVEEENVSLQDASTVKTNILLRK

SEQ ID NO: 49754 - protein, 85 aa, Homo sapiens
LKEKEEVIKELKEELDQYKDFGFHKMESFAKETSSPKSNLEKENLEYKVENERLLQIISELEEEIQINLKENSGLEDELISMKEM

SEQ ID NO: 49755 - protein, 85 aa, Homo sapiens
LDQALPEMSEEVNTGRQEGSEAPHGGDLGGSPSPAEVEEGSCTLHLEALGVELESVTEPPLEEVTETAPMEFRPLGLEGPDGLEG

SEQ ID NO: 49756 - protein, 85 aa, Homo sapiens
LRQTHRAVPVPCSFRGCPLLFGSQQGMELHRQAHYPFHCSHCSFIGSNVKLFRQHQRSHGAGTQGELSAVQGLPSQELLPAPKLP

SEQ ID NO: 49757 - protein, 85 aa, Homo sapiens
LRTHQIRGCPLEESGELHCSLCPFTAPAATALRLHQKRRHPTAAPARGPRPHLQCGDCGFTCKQSRCMQQHRRLKHEGVKPHQCP

SEQ ID NO: 49758 - protein, 84 aa, Homo sapiens
LADCSHPQELQELCQSTLTEMESQKQLCRPLTCEKSKPVPLKLFTPRLVSNSRPQVIHLPWPPNYRCEPQHPAKKVIFFRVIML

SEQ ID NO: 49759 - protein, 85 aa, Homo sapiens
LYRWYMQDSNPTRKMLDCISEEVGLKKRVVQVWFQNTRARERKGQFRSTPGGVPSPAVKPPATATPASLPKFNLLLGKVDDGTGR

SEQ ID NO: 49760 - protein, 85 aa, Homo sapiens
LSQAEATKAGGKEPEEKATPSPSPAHTCDQCAISFSSQDLLTSHRRLHFLPSLQPSAPPQLLDLPLLVFGERNPLVAATSPMPGP

SEQ ID NO: 49761 - protein, 85 aa, Homo sapiens
LRPASPLALTQGQVSGHGSCGCALPLSQEQLADLKEDLDRDDCKQEAEVVIYETNCHWEDCTKEYDTQEQLVHHINNEHIHGEKK

SEQ ID NO: 49762 - protein, 85 aa, Homo sapiens
LSLPRVQRFHSTHNVNPGPLPPCADRRGLRLQSHPSTDGGLARGAYSPRPPSISENVAMEAVAAGVDGAGPEADLGLPEDDLVLP

SEQ ID NO: 49763 - protein, 85 aa, Homo sapiens
LENLALLTSLDVHHQKQHLGEKHFRSNVGRALFVKTCTFHVSGEPSTCREVGKDFLAKLGFLHQQAAHTGEQSNSKSDGGAISHR

SEQ ID NO: 49764 - protein, 85 aa, Homo sapiens
LIKGGNANATVTKVLKDVYALKKPYGVLYKKKNITRPFEDQTSLEFFSKKSDCSLFMFGSHNKKRPNNLVIGRMYDYHVLDMIEL

SEQ ID NO: 49765 - protein, 85 aa, Homo sapiens
LLTGEVPFRGIDGLAVAYGVAMNKLALPIPSTCPEPFAKLMEDCWNPDPHSRPSFTNILDQLTTIEESGFFEMPKDSFHCLQDNW

SEQ ID NO: 49766 - protein, 85 aa, Homo sapiens
LTLLSLSSISECNSTRSLLRSDSDEIVVYEMPVSPVEAPPLSPCTHNPLVNVRVERFKRDPNQSLTPTHVTLTTPSQPSSHRRTP

SEQ ID NO: 49767 - protein, 85 aa, Homo sapiens
LDSLKAVEVVNLSVSCTATCLPFSSVPKETPARAGFSSKQTLFPITHQPLGSFGVVSTHSSTLDEEVSERMFSFYQAKEKFKKEL

SEQ ID NO: 49768 - protein, 85 aa, Homo sapiens
LSRGWFHRDLSGLDAETLLKGRGVHGSFLARPSRKNQGDFSLSVRVGDQVTHIRIQNSGDFYDLYGGEKFATLTELVEYYTQQQG

SEQ ID NO: 49769 - protein, 85 aa, Homo sapiens
LDELNKSKIIVKKKPKQLNPFHLKVGHEVLRQRKNWWKDGRFQSEWVGPCVIDYITESGCAVLRDNTGVRLKRPIKMSHLKPYIR

SEQ ID NO: 49770 - protein, 84 aa, Homo sapiens
LRSKQQSLQRQLEQLRGLAGAAERERLRADSLDSSGLSSERSDSDQEELEVDVESLVFGGEAELLRGFVAGQEHSYSHGGGAWL

SEQ ID NO: 49771 - protein, 85 aa, Homo sapiens
LENYSHLVSMGYPVSKPDVISKLEQGEEPWIIKGDISNWIYPDEYQADGRQDRKSNLHNSQSCILGTVSFHHKILKGVTRDGSLC

SEQ ID NO: 49772 - protein, 84 aa, Homo sapiens
LLDIGCGTGLSGSYLSDEGHYWVGLDISPAMLAFLLCSGSVMLTRSLKTLPSACTAFLLLFFLFSSGDPELSCSCTLRTQSSWS

SEQ ID NO: 49773 - protein, 85 aa, Homo sapiens
LELLYLPENKPCYLLDIGCGTGLSGSYLSDEGHYWVGLDISPAMLAFLLCSGSVMLTRSLKTLPSACTAFLLLFFLFSSGDPELS

SEQ ID NO: 49774 - protein, 85 aa, Homo sapiens
LTEHTKSIASAYFSPLTGNRVVTTCADCNLRIFDSSCISSKIPLLTTIRHNTFTGRWLTRFQAMWDPKQEDCVIVGSMAHPRRVE

SEQ ID NO: 49775 - protein, 84 aa, Homo sapiens
LGNFLHPINTIFFFVFTHSPFCWHLSEVVLSRYQPLQYVRDVLSAAFCTGFLFSFMINNVYTLFLFIIYCVRQEYFIPNKEFSL

SEQ ID NO: 49776 - protein, 85 aa, Homo sapiens
LRDVIQEYDEYFPEIIERASYTLEKMFRVNLKEIDKQSSLYILISTQESSAGILGTTKDTPKLGLLMVILSVIFMNGNKASEAVI

SEQ ID NO: 49777 - protein, 85 aa, Homo sapiens
LNYVPFAERSLEVVVDLYQKTACHKAVVNEKVLQNIIKTLRVPLSLKYSCPSESTWKLAVSSLLRVLSIGLPVARQHASSGKFDS

SEQ ID NO: 49778 - protein, 85 aa, Homo sapiens
LREEFSKMCFETLLQFSFSNKVTTPQEGYISRMALSVLLKRSQDVLHRYIEDERLSGKCPLPRQQVTEIIFVLKAVSTLIDSLKK

SEQ ID NO: 49779 - protein, 85 aa, Homo sapiens
LTRVRGANPEKPYAMALDYGGSMEQLEAVIDGSEHCEQEVAYHCRRSRLLNTPDGTPFTWWIGRSNERHPYWGGSPPGVQQCECG

SEQ ID NO: 49780 - protein, 85 aa, Homo sapiens
LDSEVAKANAMGFAGCMSSVQYNHIAPLKAALRHATVAPVTVHGTLTESSCGFMVDSDVNAVTTVHSSSDPFGKTDEREPLTNAV

SEQ ID NO: 49781 - protein, 85 aa, Homo sapiens
LVSMGYPVSKPDVISKLEQGEEPWIIKGDISNWIYPDEYQADGRQGKKSNLHNSQSCILGTVSFHHKILKGVTRDGSLCSILKVC

SEQ ID NO: 49782 - protein, 85 aa, Homo sapiens
LMCEVCAFACKRKYELQKHMASQHHPGTPAPLYPCHYCSYQSRHKQAVLSHENCKHTRLREFHCALCDYRTFSNTTLLFHKRKAH

SEQ ID NO: 49783 - protein, 85 aa, Homo sapiens
LGEKAHHCPLCHYSAVERNALNRHMASMHEDISNFYSDTYACPVCREEFRLSQALKEHLKSHTAAAAAEPLPLRCFQEGCSYAAP

SEQ ID NO: 49784 - protein, 8 aa, Homo sapiens
LPAESRSP

SEQ ID NO: 49785 - protein, 23 aa, Homo sapiens
LSWTSIQCGEINLEYCFFCILYY

SEQ ID NO: 49786 - protein, 85 aa, Homo sapiens
LESYENPPPIVLPSDGFQVDLEANCLDDSIYQHLLYVRHFLWGLRSRASPGSPGRPGSGASQPVCPEGMHHVVLDGHLEAPSCPL

SEQ ID NO: 49787 - protein, 85 aa, Homo sapiens
LERGPSGLGMGLIDGMHTHLGAPGLYIQTLLPGSPAAADGRLSLGDRILEVNGSSLLGLGYLRAVDLIRHGGKKMRFLVAKSDVE

SEQ ID NO: 49788 - protein, 85 aa, Homo sapiens
LTPNTTSPSTSTSISAGTTSTSTTPASTTPASTTPASTSTASSQASQEGSSPEPPPESHSSSLADHEYTAAGTFTGAQAGRTSQP

SEQ ID NO: 49789 - protein, 85 aa, Homo sapiens
LLGCGAVLAATGLGFDLLEAGKCQLLPLEEPEPPAREEKKRREGLFQRSSRPRRSTSPPSRKLFKKEEPMLLLGDPSASLTLLSL

SEQ ID NO: 49790 - protein, 85 aa, Homo sapiens
LVNVRVERFKRDPNQSLTPTHVTLTTPSQPSSHRRTPSDGALKPETLLASRSPSSNGLSPSPGAGMLKTPSPSRDPGEFPRLPDP

SEQ ID NO: 49791 - protein, 85 aa, Homo sapiens
LQEESDLSLIIAQIVQKLKGSNLYSQLERQAWGSWEKRILKSLNSMCTELSIPLARKRPVGEQKELLNKWNEMGTDEPDLSLFRP

SEQ ID NO: 49792 - protein, 85 aa, Homo sapiens
LCEFSDRRLLDKWVELRTTVAHCISVSQDYIFCGCADGTVRLFNPSNLHFLSTLPRPHALGTDIASVTEASRLFSGVANARYPDT

SEQ ID NO: 49793 - protein, 85 aa, Homo sapiens
LLDPRVGIRSVCVSPNGQHLASGDRMGTLRVHELQSLSEMLKVEAHDSEILCLEYSKPDTGLKLLASASRDRLIHVLDAGREYSL

SEQ ID NO: 49794 - protein, 85 aa, Homo sapiens
LGSVMRPTEDITARELPPPTSAQGPGRVGPRRQRKHCITEDTPPTSLYIEGLDSKEAGGQSSQEERIEREEEGKEERTEKEEVGE

SEQ ID NO: 49795 - protein, 84 aa, Homo sapiens
LGSSRVRTEPTLHKDLMEAISKDNILYLQEQEKEARSRAAYISALPTSPHWGRGFDEDKDEDEGSPGGCNPAGGNGGDFHRLVF

SEQ ID NO: 49796 - protein, 84 aa, Homo sapiens
LNTCHGQETTDSSDKKEKKSFSLEEKSKISKNRVHYMKFTKGRCQSLHSRGERNHDNQRLHHPGVLCQADGSTEEQAPGSSSRV

SEQ ID NO: 49797 - protein, 11 aa, Homo sapiens
LLEGIIQLPRM

SEQ ID NO: 49798 - protein, 32 aa, Homo sapiens
LCPQVGSHRRARGRAVRPRRARQAQPPGPQPA

SEQ ID NO: 49799 - protein, 12 aa, Homo sapiens
LCLKRSPDSPTD

SEQ ID NO: 49800 - protein, 84 aa, Homo sapiens
LQELGGTLEYRVTFRDTYYDTPELSLMQADHWLRRREDSGWELKCPGAAGVLGPHTEYKELTAEPTIVAQLCKVCLHRRQHQPS

SEQ ID NO: 49801 - protein, 84 aa, Homo sapiens
LKKPPANLYQIIRKALCAGSLLGCSIDVSSAAEAEAITSQKLVKSHAYSVTGVEEVNFQGHPEKLIRLRNPWGEVEWSGAWSDE

SEQ ID NO: 49802 - protein, 85 aa, Homo sapiens
LTAENRYYCESCASLQDAEKVVELSQGPCYLILTLLRFSFDLRTMRRRKILDDVSIPLLLRLPLAGGRGQAYDLCSVVVHSGVSS

SEQ ID NO: 49803 - protein, 85 aa, Homo sapiens
LLINSQPKSRKTSTLQTVRIERSPLLDQVQTFLPQMARANEKLRKEMAAAPPGRFNIENIDGPHSKVIQMDVALFEMNQSDSKEV

SEQ ID NO: 49804 - protein, 85 aa, Homo sapiens
LNWMEGDPDKLSDCDDSIALSFWKAIEKEATSWMVKAETFHFVFGSFKLERSAPKPRLEHQKKVRKMEENGNMPTKLQKLDLSSY

SEQ ID NO: 49805 - protein, 84 aa, Homo sapiens
LDFSDDNARAVITIGIPFPNVKDLQLTSATAEGTNGYAQSWVSYSKMADAALTTATDETVDIYPRNLLSPSTALVLHSTEVECY

SEQ ID NO: 49806 - protein, 85 aa, Homo sapiens
LKDYDWINAERHLFGQPNSAYDFKTNNPKEAGQRLQKLQEMKEKLGRNVNMRAMNVLTEAEERYNDLMKKKRIVENDKSKILTTI

SEQ ID NO: 49807 - protein, 85 aa, Homo sapiens
LAFHPARDLLAAGDVDGDVFVFSYSCQEGETKELWSSGHHLKACRAVAFSEDGQSEYWGRQPAMWWKGAVSSTMTWAPFPQSSLL

SEQ ID NO: 49808 - protein, 85 aa, Homo sapiens
LKSRISMRSRHPRRAISEGHKSEGTMPPNKEASGLSSSPAGLICLPPISEELQLVWTQAAQTSELDSNEHLLKTFSYFPYPSLAD

SEQ ID NO: 49809 - protein, 84 aa, Homo sapiens
LDSHSYEITSQNVKDGGRYTFEDAQEHIYKLMKSDSYARFLRSNAYQDLLLAKKKPESEQGRRTSLEKFTRSVLYSNTPLAKRP

SEQ ID NO: 49810 - protein, 85 aa, Homo sapiens
LNAQIDRHCLKMSKVAESLIAYTEQYVEYDPLITPAEPSNPWISDDVALWDIEMSKEPSQQRVKRWGFSFDEILKDQVGRDQFLR

SEQ ID NO: 49811 - protein, 85 aa, Homo sapiens
LPAGFRQKDQTQKAATGPFDREHLLMYLEKEALEQKDREDFVPFTGEKKGRVFIPKEKPIETRKEEKVTLDPELEEALASASDTE

SEQ ID NO: 49812 - protein, 85 aa, Homo sapiens
LKNQCTDVGIKEGPLSPAQTSQVTSLSSWTGYLLFQPVASSHLEQREALWIEEKGTPQASCSVSLLLPRLQCSGVISAHCNLHLP

SEQ ID NO: 49813 - protein, 85 aa, Homo sapiens
LQQSIGETNVERKAKKKRSKSVTSSSSSSSDSSASDSSSESEETSTSSSSEDSDTDESSSSSSSSASSTTSSSSSDSDSDSSSSS

SEQ ID NO: 49814 - protein, 19 aa, Homo sapiens
LGPEHPWARASCSPTAKIG

SEQ ID NO: 49815 - protein, 85 aa, Homo sapiens
LPKDKLNPPTPSIYLENKRDAFFPPLHQFCTNPNNPVTVIRGLAGALKLDLGLFSTKTLVEANNEHMVEVRTQLLQPADENWDPT

SEQ ID NO: 49816 - protein, 85 aa, Homo sapiens
LNFLMGSWWPNLEDLYEANVPVYRFIQRPGDLVWINAGTVHWVQAIGWCNNIAWNVGPLTACQYKLAVERYEWNKLQSVKSIVPM

SEQ ID NO: 49817 - protein, 85 aa, Homo sapiens
LDFICRTLSVSSKNISLHGDGPLRLLLLPSIHLEALDLLSALILACGSRLLRFGILIGRLLPQVLNSWSIGRDSLSPGQERPYST

SEQ ID NO: 49818 - protein, 85 aa, Homo sapiens
LLQPRTGSAVAPVHPPNRSAPHLPGLMCLLRLHGSVGGAQNLSALGALVSLSNARLSSIKTRFEGLCLLSLLVGESPTELFQQHC

SEQ ID NO: 49819 - protein, 85 aa, Homo sapiens
LSPSPGAGMLKTPSPSRDPGEFPRLPDPNVVFPPTPRRWNTQQDSTLERPKTLEFLPRPRPSANRQRLDPWWFVSPSHARSTSPA

SEQ ID NO: 49820 - protein, 85 aa, Homo sapiens
LVNAYVMTSREPPLNTAACRLLLDIMPGLETAVVFQEKEGIVENLFKWAREADQPLRTYSTGLLGGAMENQDIAANYRDENSQLV

SEQ ID NO: 49821 - protein, 85 aa, Homo sapiens
LIRNHLISKGLGETATVLTKEADLPMTAASHSSAFTPVTAAASPVSLPRTPRIANGIATRLGSHAAVGASAPSAPTAHPQPRPPQ

SEQ ID NO: 49822 - protein, 85 aa, Homo sapiens
LMLGTCTGQLKLYNVFSGQEEASYNCHNSAITHLEPSRDGSLLLTSATWSQPLSALWGMKSVFDMKHSFTEDHYVEFSKHSQDRV

SEQ ID NO: 49823 - protein, 85 aa, Homo sapiens
LAESVDVLDEAGSTVSTVGISIILGVAEGEFFIHDAEIQKSALQIIINCVCGPDNRISSIGKFISGTPRRKLPQNPKSSEHTLAK

SEQ ID NO: 49824 - protein, 85 aa, Homo sapiens
LLTSATWSQPLSALWGMKSVFDMKHSFTEDHYVEFSKHSQDRVIGTKGDIAHIYDIQTGNKLLTLFNPDLANNYKRNCATFNPTD

SEQ ID NO: 49825 - protein, 84 aa, Homo sapiens
LPSFHAIMGPLQALLTDHLADCSHPQELQELCQSTLTEMESQKQLCRPLTCEKSKPVPLKLFTPRLAGLEFPTSGNPPALAPQL

SEQ ID NO: 49826 - protein, 85 aa, Homo sapiens
LPKDKLNPPTPSIYLENKRDAFFPPLHQFCTNPKNPVTVIRGLAGALKLDLGLFSTKTLVEANNEHMVEVRTQLLQPADENWDPT

SEQ ID NO: 49827 - protein, 85 aa, Homo sapiens
LNFLMSSWWPNLEDLYEANVPVYRFIQRPGDLVWINAGTVHWVQAVGWCNNIAWNVGPLTACQYKLAVERYEWNKLKSVKSPVPM

SEQ ID NO: 49828 - protein, 85 aa, Homo sapiens
LDERLQRHRTSGGDHAPDSPSGENSPAPQGRLAEVQDSSMPVPAQPKAGGSGSYWPARHSGARVILLVLYREHLNPNGHHFLTKE

SEQ ID NO: 49829 - protein, 85 aa, Homo sapiens
LTNSYVGSNYRPSFLQDNELRHLILKTAEGFLFVVGCERGKILFVSKSVSKILNYDQASLTGQSLFDFLHPKDVAKVKEQLSSFD

SEQ ID NO: 49830 - protein, 85 aa, Homo sapiens
LAAEHGLSAEQVYNADETGLFWRCLPNPTPEGGAVPGPKQGKDRLTVLMCANATGSHRLKPLAIGKCSGPRAFKGIQHLPVAYKA

SEQ ID NO: 49831 - protein, 84 aa, Homo sapiens
LRVLGSMCQRLRSMQYNGSYFDRGAKGGSRLCTPEGWFSCQGPFDMDSCLSRHSINPYSNRESRILFSTWNLDHIDGVLLCGPG

SEQ ID NO: 49832 - protein, 85 aa, Homo sapiens
LGDRGFFPDAAVFIQVDDQDIFDRLLPAQIEKWKLKQKKKLERKKLIKDMKAKIRVDTIAKRRAELILERDKKRREPNKEKRKRG

SEQ ID NO: 49833 - protein, 85 aa, Homo sapiens
LSDTPAPKRKRSPPLGGAPSPSSLSLPPSTGFPLQASGVPSPYLSSLASSRYPPFPSDYLALQLPEPSPLRPKREKRPRLPRKLK

SEQ ID NO: 49834 - protein, 6 aa, Homo sapiens
LGSRIQ

SEQ ID NO: 49835 - protein, 84 aa, Homo sapiens
LPEDKVLGTFEFDETSFWNSSHPRGWNDHVHILDTETFTWSQPITTGKAPSPRAAHACATVGNRGFVFGGRYRVSIQTTSMTCF

SEQ ID NO: 49836 - protein, 84 aa, Homo sapiens
LQLVCNALLAQEDPLPLAFFVHDAEIVSSLGKTLESQAVETEKVLDIIYQPQAIFRVRAVTRCTSSLEGHSEAVISVAFSPTGK

SEQ ID NO: 49837 - protein, 28 aa, Homo sapiens
LKPKIKRTLNSKLLKKKKSLKLKMSLKS

SEQ ID NO: 49838 - protein, 30 aa, Homo sapiens
LLLNKSPAAICQQTARMYRVTSPISLQRAL

SEQ ID NO: 49839 - protein, 85 aa, Homo sapiens
LERVRVSCTIIFLASIFQLAMWTTALLHQAETLQPSVWFGGREHVLMFAKLALYPCASLLAFASTCLLSRFSVGIFHLMQIAVPC

SEQ ID NO: 49840 - protein, 85 aa, Homo sapiens
LGGMLAGHSESGGELIERDGKKYKLFYGMSSEMAMKKYAGGVAEYRASEGKTVEVPFKGDVEHTIRDILGGIRSTCTYVGAAKLK

SEQ ID NO: 49841 - protein, 85 aa, Homo sapiens
LVRRLQSGQFGDVGFNPYEPAVDFFSGDVMIHPVTNRPADKRSFIPSLVEKEKVSRMVHAIKMGWIQPRRPRDPTPSFYDLWAQE

SEQ ID NO: 49842 - protein, 85 aa, Homo sapiens
LSIIATVMQFDRSVQRLLATRIAVYLMTFLIVTVAWAAHTRLFQVVGKTDDTLALLNLACMMTITFLPYTFSLMVTFPDVPLGIF

SEQ ID NO: 49843 - protein, 84 aa, Homo sapiens
LQSPLVTWVKTFGPFGSGSQDNLTMYMDLVDGIFLNQIMLQIDPRPTNQRINKHVNNDVNLRIQNLTILVRNIKTYYQDRPFFR

SEQ ID NO: 49844 - protein, 85 aa, Homo sapiens
LPSIRKASLALIRKMIHFCSEALLKEVCDSDVGHNLPTILVEITATVLDQEDDDDGHLLALQIIRDLVDKGGDIFLDQLARLGVI

SEQ ID NO: 49845 - protein, 85 aa, Homo sapiens
LVPAFDPRPGRTNVQQTTDLEIPPPGTPHSELLEEVECTPSPRLALTLKVTGLGTTREVELPLTNFRSTIFYYVQKLLQLSCNGN

SEQ ID NO: 49846 - protein, 85 aa, Homo sapiens
LKLESHSITESKSLIPVAWTSLTQMLLEAPGIFLLGQRKRFSTMPETETHERETELFSPPSDVRGMTKLDRTAFKKTVNIPVLKV

SEQ ID NO: 49847 - protein, 84 aa, Homo sapiens
LAERSIEEVYYLWCLAGGDLEKELVNKEIIRSKPPICTLPNFLFEDGESFGQGRDRSSLLDDTTVTLSLCQLRNEQTFCLQVGS

SEQ ID NO: 49848 - protein, 85 aa, Homo sapiens
LSDTPAPKRKRSPPLGGAPSPSSLSLPPSTGFPLQASGVPSPYLSSLPEPSPLRPKREKRPRLPRKLKMAVGPPDCPVGGPLTFP

SEQ ID NO: 49849 - protein, 85 aa, Homo sapiens
LNMIVAVIDSAQLQELVCHVMMGNLVMFRKDSVLNILIQSLDWETFEQYCAWQLFLAHNIPLETIIPILQHLKYKEHPEALSCLL

SEQ ID NO: 49850 - protein, 85 aa, Homo sapiens
LRLNLTNTKQNCMPSTLGVQCRRCCPGPDYAWSQAGGRGRTPGATTHTRDKTTCACCLISSQTSDCFSFPALPFLPLVFSQTPIL

SEQ ID NO: 49851 - protein, 85 aa, Homo sapiens
LAKAYASNHPIMKTGEPHCPGDEDETFKDGITNGAHWYDVEGGMQDYNYVWANCFEITLELSCCKYPPASQLRQEWENNRESLIT

SEQ ID NO: 49852 - protein, 85 aa, Homo sapiens
LIEKVHIGVKGFVKDSITGSGLENATISVAGINHNITTGRFGDFYRLLVPGTYNLTVVLTGYMPLTVTNVVVKEGPATEVDFSLR

SEQ ID NO: 49853 - protein, 84 aa, Homo sapiens
LRMKFMQRGLDSETKKQLEEEEKKIISEEHWYLDLPELKEKESFIIEEQSFLLCEDLLYGRMSFRGFNPEVEVFLHQVPFLLII

SEQ ID NO: 49854 - protein, 31 aa, Homo sapiens
LKVKIAWGCSPERRCVTASGMTLTTQRLPSA

SEQ ID NO: 49855 - protein, 7 aa, Homo sapiens
LSATAMC

SEQ ID NO: 49856 - protein, 85 aa, Homo sapiens
LGSPDSTSPSSSPTFWNYSRSMGDYAQTLKKFQYQLACRSQAPCANKDEADLSSKQAAEEVWARVAMNRQLLDHMDSWTAKFRNW

SEQ ID NO: 49857 - protein, 85 aa, Homo sapiens
LRSRYRSSPTVYNSPTDKEDYMTDLRTLDTFLRSEEEKQHRVKLGSPDSTSPSSSPTFWNYSRSMGDYAQTLKKFQYQLACRSQA

SEQ ID NO: 49858 - protein, 85 aa, Homo sapiens
LVKAPLIPTLNTIVQYLDLTPNQEYLFERIKELSQGGCMSSFRWNRGGDFKGRKWDTDLPTDSAIIMHVFCTYLDSRLPPHPKYP

SEQ ID NO: 49859 - protein, 84 aa, Homo sapiens
LSPKPDWRSVLVFILLAVAPPAPPSSSQLCRYFPACKKMECPFYHPKHCRFNTQCTRPDCTFYHPTINVPPRHALKWIRPQTSE

SEQ ID NO: 49860 - protein, 84 aa, Homo sapiens
LRPPGGGSNFSLGFDEPTEQPVRKNKMASNIFGTPEENQASWAKSAGAKSSGGREDLESSGLQRRNSSEASSGDFLDLKVSVTA

SEQ ID NO: 49861 - protein, 84 aa, Homo sapiens
LPRRIIKETQRLLAEPVPGIKAEPDESNARYFHVVIAGPQDSPFEGGTFKLELFLPEEYPMAAPKISGPQHCRSAQFCYRSRPC

SEQ ID NO: 49862 - protein, 85 aa, Homo sapiens
LRVFRGNVQLAAQTLAHNGGSLPPELPLSPEDSLSPPATSPSDSAGTSSASTDEDMETEAVNEILEDIPEHEEDYLDSTLEDEEI

SEQ ID NO: 49863 - protein, 85 aa, Homo sapiens
LQLGFTAQEARLGLRACDGNVDHAATHITNRREELAQIRKEEKEKKRRRLENIRFLKGMGYSTHAAQQVLHAASGNLDEALKILL

SEQ ID NO: 49864 - protein, 85 aa, Homo sapiens
LACCGGFLEVADFLIKAGADIELGCSTPLMEAAQEGHLELVKYLLAAGANVHATTATGDTALTYACENGHTDVADVLLQAGADLE

SEQ ID NO: 49865 - protein, 85 aa, Homo sapiens
LLDNGADIEAQSERTKDTPLSLACSGGRQEVVELLLARGANKEHRNVSDYTPLSLAASGGYVNIIKILLNAGAEINSRTGSKLGI

SEQ ID NO: 49866 - protein, 85 aa, Homo sapiens
LDKGADVNAPPVPSSRDTALTIAADKGHYKFCELLIGRGAHIDVRNKKGNTPLWLAANGGHLDVVQLLVQAGADVDAADNRKITP

SEQ ID NO: 49867 - protein, 85 aa, Homo sapiens
LALAAKREKRKEKRRKKKEEQRRKLEEIEAKNKENFELQAAQEKEKLKVEDEPEVLTEPPSATTTTTIGISATWTTLAGSHGKRN

SEQ ID NO: 49868 - protein, 85 aa, Homo sapiens
LPMVVPPQEPDKPPANVATTLPIRNKAASKQKSSSHLPANSQDVQGYITNQSPESIVEEAQGKLTELEQRIKEAIEKNAQLQSLE

SEQ ID NO: 49869 - protein, 85 aa, Homo sapiens
LAHADQLTKEKIEELNKTREEQIQKKQKILEELQKVERELQLKTQQQLKKQYLEVKAQRIQLQQQQQQSCQHLGLLTPVGVGEQL

SEQ ID NO: 49870 - protein, 85 aa, Homo sapiens
LERIKAGKAACIDKLCITPQELLSRLGEFEQFCPVSLAESQELFDCSATDSLEFAAEFRGHYYKMSSQEKLNKFLENPELYVPPL

SEQ ID NO: 49871 - protein, 84 aa, Homo sapiens
LVDRPDGTYCFRLHNDRVYYVSEKIMKLAANISGDKLVSLGTCFGKFTKTHKFRLHVTALDYLAPYAKVCGAVSNSATGDEVKD

SEQ ID NO: 49872 - protein, 85 aa, Homo sapiens
LIKSDKFKDIPFNKNNKFNALPRSILLDNIIQHMNLRLLSDRNHEDIFNYFDLLEPSTWPYEEITSPWIAGEKTLFHLCKILKYE

SEQ ID NO: 49873 - protein, 85 aa, Homo sapiens
LGARLYVGGAEELPRRVGCQLLHVAGRHHPDVFAEFFSARRVLRLLQGGAGPPGPRALACVQLGLQLLPEGPAADEVFALLRREV

SEQ ID NO: 49874 - protein, 85 aa, Homo sapiens
LRTVCERPGPAACAQVARLLARHPRCVPDGPHRLLFCQQLVRCLGRFRCPAEGEEGAVEFLEQAQQVSGLLAQLWRAQPAAILPC

SEQ ID NO: 49875 - protein, 85 aa, Homo sapiens
LRFSFDLRTMRRRKILDDVSIPLLLRLPLAGGRGQAYDLCSVVVHSGVSSESGHYYCYAREGAARPAASLGTADRPEPENQWYLF

SEQ ID NO: 49876 - protein, 85 aa, Homo sapiens
LGCAFPYAAYSMPASWLHGHLHQFFVPAAALNSFLCTGLSCYSRTAMVTGLFLPPPSFLELESPGLSKVLRTGAFAYPFLFDNLP

SEQ ID NO: 49877 - protein, 85 aa, Homo sapiens
LASTVSTPVSKTAELSPKNLLSPSSFKAECSEDVENLNAPPAEAGYDQNKTDFDETSSINTAISDATTGDEGNTEMESTTGSSGD

SEQ ID NO: 49878 - protein, 85 aa, Homo sapiens
LNNVQNLQNGNGEQVFGHSAPAPNTSLSGCGTPSPSKPKQKPTWRCEVCDYETNVARNLRIHMTSEKHMHNMMLLQQNMKQIQHN

SEQ ID NO: 49879 - protein, 85 aa, Homo sapiens
LHLGLAPAEAELYQYYLAQNIGLTGMKLENPADPQLMINPFQLDPATAAALAPGLGELSPYISDPALKLFQCAVCNKFTSDSLEA

SEQ ID NO: 49880 - protein, 85 aa, Homo sapiens
LHKEKTIKQAMRNAKEHVRLLPHSVCSPNPNTTSTSQSAASSNNTYPHLSCFSMKSWPNILFQASARRAASPPSSPPSLSLPSTV

SEQ ID NO: 49881 - protein, 85 aa, Homo sapiens
LNNPLSAATGNTTTASSQGEPEDSTSKGEEKGNENEDENKDSEKSTDAVSAADSANGSVGAATAPAGLPSNPLAFNPFLLSTMAP

SEQ ID NO: 49882 - protein, 85 aa, Homo sapiens
LKACRNLGKNGLSNSSILLDKCPPPRPPSSPYPPLPKDKLNPPTPSIYLENKRDAFFPPLHQFCTNPNNPVTVIRGLAGALKLDL

SEQ ID NO: 49883 - protein, 12 aa, Homo sapiens
LCLKRSPDSPTD

SEQ ID NO: 49884 - protein, 84 aa, Homo sapiens
LKNACTAILSVEKRLNFTLRHLDVTCEAYDHFRSCLHALEQLADGKLRFVVEPVEASFPQLLVYERLQQLVGPGPEAGPLVALL

SEQ ID NO: 49885 - protein, 85 aa, Homo sapiens
LIYGLWNKTVRKELLGMCFGDRYYREPFVQRQRTSRLFSISNRITDLGLSPHLTALMAGGQPLGHSSSTGDTGFSCSQDSGTDMM

SEQ ID NO: 49886 - protein, 85 aa, Homo sapiens
LLEDYTSDDNPPSHCTCPPKRRSSVTFEDEVEQIKEAAKNSILHVKAEVHKSLDSYAASLAKAIEAEAKINLFGEEALPGVLVTA

SEQ ID NO: 49887 - protein, 85 aa, Homo sapiens
LISSASMLTLGVIAIDRYYAVLYPMVYPMKITGNRAVMALVYIWLHSLIGCLPPLFGWSSVEFDEFKWMCVAAWHREPGYTAFWQ

SEQ ID NO: 49888 - protein, 9 aa, Homo sapiens
LLLCYDLED

SEQ ID NO: 49889 - protein, 85 aa, Homo sapiens
LQGALLTHFLQPIYLKSVTLGYLFSQGHLTRAICCRVTRDGSAFEDGLRHPFIVNHPKVGRVSIYDSKRQSGKTKETSVNWCLAD

SEQ ID NO: 49890 - protein, 85 aa, Homo sapiens
LLVTPRPERGGRGTELGEFCGTPLLFSKSQGLATRPRGDRYEGSYFCYDNPAALQTQVKRDMQVNTTKFMLLYAWYSWPNVVLCF

SEQ ID NO: 49891 - protein, 85 aa, Homo sapiens
LPMEESYINFLAINQKCPLQEMKPQRNTADLLPKLKSMALADRAVFEKGMKAFVSYVQAYAKHECNLIFRLKDLDFASLARGFAL

SEQ ID NO: 49892 - protein, 85 aa, Homo sapiens
LRMPKMPELRGKQFPDFVPVDVNTDTIPFKDKIREKQRQKLLEQQRREKTENEGRRKFIKNKAWSKQKAKKEKKKKMNEKRKREE

SEQ ID NO: 49893 - protein, 85 aa, Homo sapiens
LNDYLEETHLKFRKFIHRACQVPEPEERFAVDEYSDMVAVAKPMVYITVGELVNTHRLLLEHQDCIAPDHQDPLHELLEDLGELP

SEQ ID NO: 49894 - protein, 85 aa, Homo sapiens
LGIFLFCVCVIAIGVVQALIVGYAFHFPHLLSPQIQRSAHRALYRRHVLGIVLQGPALCFAAAIFSLFFVPLSYLLMVTVILLPY

SEQ ID NO: 49895 - protein, 44 aa, Homo sapiens
LQQFIRPWCTSLRNIRDNEEKDSAFRGICMMIGVNPGGVVQPPG

SEQ ID NO: 49896 - protein, 85 aa, Homo sapiens
LAKAKECWEQEHEEREAEKVRYLAERIPTLQTRGLSLSALQDLCRELHAKVEVVDEERYDIEAKCLHNTREIKDLKLKVMDLRGK

SEQ ID NO: 49897 - protein, 85 aa, Homo sapiens
LCRELHAKVEVVDEERYDIEAKCLHNTREIKDLKLKVMDLRGKFKRPPLRRVRVSADAMLRALLGSKHKVSMDLRANLKSVKKED

SEQ ID NO: 49898 - protein, 85 aa, Homo sapiens
LEELEKQMTSFYDSLGKINEIITVLEREAQSSALFKQKHQELLACQENCKKTLTLIEKGSQSVQKFVTLSNVLKHFDQTRLQRQI

SEQ ID NO: 49899 - protein, 85 aa, Homo sapiens
LQQHLNSHDEKLDVFSRTRGRGRGRGKRRFGPGRRPGRPPKFIRLEITSENGEKSDDGTQDLLHFPTKEQFDEAEPATLNGLDQP

SEQ ID NO: 49900 - protein, 84 aa, Homo sapiens
LRHQRAHEPPRPELRCPACLKAFKDPGYFRKHLAAHQGGRPFRCSSCGEGFANTYGLKKHRLAHKAENLGGPGAGAGTLAGKDA

SEQ ID NO: 49901 - protein, 85 aa, Homo sapiens
LEKIVPIIAVPSSEQEIMHMLRMIRKHVRKNYMKFKAKFSLIQFHRIIESAILSFTSLIKHLNLHKISKSVTTLQKNLCDIIESK

SEQ ID NO: 49902 - protein, 85 aa, Homo sapiens
LKEKLSKSEDPVHYKSLVGCKKSEENYQDQNNSSINTVKHDIKKNFNICFDNIKNSQSEERSLEVHCPSTPKSEKNEGSSIEDAQ

SEQ ID NO: 49903 - protein, 85 aa, Homo sapiens
LHNSHKKRRNISDLNHPHKKQRKETDLTNKEKTKKPTQDSCENTEAHQKKASKKKAPPVTKDPSSLKATPGIKDSSAALATSTSL

SEQ ID NO: 49904 - protein, 85 aa, Homo sapiens
LVGCADRTVKHFSTEDGIFQGQRHCPGGEGMFRGLAQADGTLITCVDSGILRVWHDKDKDTSSDPLLELRVGPGVCRMRQDPAHP

SEQ ID NO: 49905 - protein, 85 aa, Homo sapiens
LTTEATQTPVSNKKPVFDLKASLSRPLNYEPHKGKLKPWGQSKENNYLNQHVNRINFYKKTYKQPHLQTKEEQRKKREQERKEKK

SEQ ID NO: 49906 - protein, 85 aa, Homo sapiens
LQDMSCQLLVNAEGTDCLEAKEKVHVIGNRLKLLLKEVSRHIKELEKLLDVSSSQQDLSSWSSADELDTSGSVSPTSGRSTPNRQ

SEQ ID NO: 49907 - protein, 70 aa, Homo sapiens
LFPQVTEIQRYLQKERNLSTQMSHPNLEKIKELQSLLQTLRSFMKLILRKWSPLINILREKRNILKNTIP

SEQ ID NO: 49908 - protein, 85 aa, Homo sapiens
LTRIAAGKTLDAQFENDERITPLESALMIWGSIEKEHDKLHEEIQNLIKIQAIAVCMENGNFKEAEEVFERIFGDPNSHMAAAKV

SEQ ID NO: 49909 - protein, 85 aa, Homo sapiens
LKELAFLRDLAEQNSGKYGVPDRMALPVIKGSMMVLNQLSNLETTVGRFYTNLPNRMIDEAVFSLPFSDEMGDGLIMTVSKPCYF

SEQ ID NO: 49910 - protein, 85 aa, Homo sapiens
LESGDCFGVLDCEWCMVDSDGKTHLDKPYCAPQKECFGGIVGAKSPYVDDMGAIGDEVITLNMIKSAPVGPVAGGIMGCIMVLVL

SEQ ID NO: 49911 - protein, 85 aa, Homo sapiens
LNTYIVRRYIATPNGVLRIYPGSLMDKAFDPTRRQWYLHAVANPGLISLTGPYLDVGGAGYVVTISHTIHSSSTQLSSGHTVAVM

SEQ ID NO: 49912 - protein, 85 aa, Homo sapiens
LTNSEPLDLDFSIQVLSSGSWPFQQSCTFALPSELERSYQRFTAFYASRHSGRKLTWLYQLSKGELVTNCFKNRYTLQASTFQMA

SEQ ID NO: 49913 - protein, 85 aa, Homo sapiens
LYEINVEDTNEIDWEDLASAIGDVPPSYVQTKFSRLKAVYVPFWQKKTFPEIIDYLYETTLPLLKEKLEKMMEKKGTKIQTPAAP

SEQ ID NO: 49914 - protein, 85 aa, Homo sapiens
LENFTLLASLGLASSKTHEITQLESWEEPFMPAWEVVTSAILRGSWQGAKAEAAAEQSASVEVPSSNVQQHQKQHCGEKPLKRQE

SEQ ID NO: 49915 - protein, 85 aa, Homo sapiens
LNPQDTLKNYVPSYDPSSPQTSQLRICDWTMNQNGRHLYPSTSEDTLGITWQSPGTWASLVPFQVSNRTPILPANVQNYGLNIIG

SEQ ID NO: 49916 - protein, 85 aa, Homo sapiens
LPSNSVTQGAALNHLSSHTATSGGQQGITLTKESKPSGNILTVPETSRHTGETPNSTASVEGLPNHVHQMTADAVCSPSHGDSKS

SEQ ID NO: 49917 - protein, 85 aa, Homo sapiens
LVDLETVKGRSNRENLEDAFTIAETELGIPRLLDPEDVDVDKPDEKSIMTYVAQFLKHYPDIHNASTDGQEDDEILPGFPSFANS

SEQ ID NO: 49918 - protein, 84 aa, Homo sapiens
LDEEIFDDDDFYHQLLRELIERKTSSLDPNDQVAMGRQWLAIQKLRSKIHKKVDRKASKGRKLRTELYRSLFGQLHPPDEGHGD

SEQ ID NO: 49919 - protein, 85 aa, Homo sapiens
LPLPDDEHDLSDRELELEDSAALSDLHWHDRSADSLLSPQPSSNLSLSLAQPLRSERSGRDTPASVDSIPLEWDHDYDLSRDLES

SEQ ID NO: 49920 - protein, 85 aa, Homo sapiens
LTPQKLQMRPTGVAQVRSTGIPNGPTADSSLPTNSVSGQQPQLALTRVPSVSQPGVRPACPGQPLANGPFSAGHVPCSTSRTLGS

SEQ ID NO: 49921 - protein, 85 aa, Homo sapiens
LQLHELTKLPAFVRVVSAGNLLSHVGHTILGMNTVQLYMKVPGSRTPGHQENNNFCSVNINIGPGDCEWFVVPEGYWGVLNDFCE

SEQ ID NO: 49922 - protein, 85 aa, Homo sapiens
LAILKSFFLQCQWARREDYQKLEQITGLPRPEIIQWFGDTRYALKHGQLKWFRDNAVPGAPSFQDPAIPTPPPSTRSLNERAETP

SEQ ID NO: 49923 - protein, 85 aa, Homo sapiens
LAKEEDVATKRSKPTEDNKFCHEQFYQCPYCNYNSRDQSRIQMHVLSQHSVQPVICCPLCQDVLSNKMHLQLHLTHLHSVSPDCV

SEQ ID NO: 49924 - protein, 85 aa, Homo sapiens
LGSSLTQMPPQASSSHTTAPTTVAASLKRKLDDKEDNNCSEKEGGNSGEDQHRDKRLRTTITPEQLEILYEKYLLDSNPTRKMLD

SEQ ID NO: 49925 - protein, 85 aa, Homo sapiens
LHLGLAPAEAELYQYYLAQNIGLTGMKLENPADPQLMINPFQLDPATAAALAPGLVNNELPPEIRLASGQLMGDDLSLLTAGELS

SEQ ID NO: 49926 - protein, 85 aa, Homo sapiens
LAFKTMQKLQIHSQYHAIRAATMCNLCQRSFRTFQALKKHLEAGHPELSEAELQQLYASLPVNGELWAESETMSQDDHGLEQEME

SEQ ID NO: 49927 - protein, 85 aa, Homo sapiens
LAVERYEWNKLQSVKSIVPMVHLSWNMARNIKVSDPKLFEMIKYCLLRTLKQCQTLREALIAAGKEIIWHGRTKEEPAHYCSICE

SEQ ID NO: 49928 - protein, 85 aa, Homo sapiens
LLMGKANNNVGTGTCDKVNNIHPAVHTKTDNSVASSPSSAISTATPSPKSTEQTTTNSVTSLNSPHSGLHTINGEGMEESQSPMK

SEQ ID NO: 49929 - protein, 85 aa, Homo sapiens
LQLDLGETGQQDPDQPKKQKILVEEMAPLKGVQEQQVRHECEVTKPEKEKGEETRIENGKLIVVTDSCGRVESSGKISEPMEAHN

SEQ ID NO: 49930 - protein, 85 aa, Homo sapiens
LKCIAIGNPVHLKCNACDYYTNSVDKLRLHTTNHRHEAALKLYKHLQKQEGAVNPESCYYYCAVCDYTTKVKLNLVQHVRSVKHQ

SEQ ID NO: 49931 - protein, 12 aa, Homo sapiens
LTGKRPDQNQQD

SEQ ID NO: 49932 - protein, 41 aa, Homo sapiens
LWNPVTLCLRGMAFGSGRDSVPCPVVTKSYAGTCWACKGHC

SEQ ID NO: 49933 - protein, 85 aa, Homo sapiens
LVSYPSVGGATRPSASCQQQRAGHSDVRLSAHHHRMRRKAAVKRLDPARLPCHWVRPLAEVLVPDSQTRPLEAYRGRQRGEKTKA

SEQ ID NO: 49934 - protein, 84 aa, Homo sapiens
LTVLRAFPCRSRLGDAETAAAIEEEMLLVEFYKGSPDLVRLQEPWSQEHTYLDKLKISLASRTPKDQSLCHVLEQVCGVLKQGS

SEQ ID NO: 49935 - protein, 85 aa, Homo sapiens
LKPDTLIKLYLGYKNKKLRVNINVPMKTEQKQEQETTHKNIEEDRKLLIQAAIVRIMKMRKVLKHQQLLGEVLTQLSSRFKPRVP

SEQ ID NO: 49936 - protein, 85 aa, Homo sapiens
LWLCLYAKLGELCVDPRPAVRKSAGQTLFSTIGAHGTLLQHSTWHTVIWKVLFHLLDRVRESSTTADKEKIESGGGNILIHHSRD

SEQ ID NO: 49937 - protein, 85 aa, Homo sapiens
LENYRNLVSLDWETRPEMKELDPKNDISEDKLSVVGEATGGPTRNGARGPGSEGVWEPGSWPERPRGDAGAEWEPLGIPQGNKLL

SEQ ID NO: 49938 - protein, 85 aa, Homo sapiens
LHKVANSPLLNVKSNLAIARLKRTEFKRLHHERWKREGKLHNHGTVDWNSKRRNLRFFCQNQFLNKTEGETNADIPLQGKSIVDN

SEQ ID NO: 49939 - protein, 85 aa, Homo sapiens
LQEAVRKLHKQWKDLQGEAPYHLLHLKIDVEKNRFLASVEECRTELDRETKLMPQEGSEKIIKEHRVFFSDKGPHHLCEKRLQLI

SEQ ID NO: 49940 - protein, 85 aa, Homo sapiens
LVLLLMCFLGFAIFAMIILLPFRLKLNEWGTIIFSCFVCIGQVVFALGGIFNAFWLMEFGRFVFGIGGESLAVAQNTYAVSWFKG

SEQ ID NO: 49941 - protein, 85 aa, Homo sapiens
LDVLKLPPKGAWRPSLNIATVLTSIQLLMSEPNPDDPLMADISSEFKYNKPAFLKNARQWTEKHARQKQKADEEEMLDNLPEAGD

SEQ ID NO: 49942 - protein, 85 aa, Homo sapiens
LDSDPSLAVSDVVGHFDDLADPSSSQDGSFSAQYGVQTLDMPVGMTHEPPALSPSIVVNSTLSSYVANQASSGAGGQPNITKLII

SEQ ID NO: 49943 - protein, 85 aa, Homo sapiens
LYRKPVTGMWDHLQEQANDGTPISIGDSIFVGDAAGRPANWAPGRKKKDFSCADRLRTVSRSGPLCLPESRALLSASPEVVVAVG

SEQ ID NO: 49944 - protein, 85 aa, Homo sapiens
LAHGADPTHRLKDGSTMLIEAAKGGHTSVVCYLLDYPNNLLSAPPPDVTQLTPPSHDLNRAPRVPVQALPMVVPPQEPDKPPANV

SEQ ID NO: 49945 - protein, 85 aa, Homo sapiens
LDNMPLRGKQLRVRFACHSASLTVRNLPQFPRPVTVEPMDQLDDEEGLPEKLVIKNQQFHKEREQPPRFAQPGSFEYEYAMRWKA

SEQ ID NO: 49946 - protein, 85 aa, Homo sapiens
LRLICIYFSNTHFFKDENNSSLLNNYVLGAQLSHGHVNNLRDPVNISFWHNQSLVLLGAPPFPLHPCPSVTLLLNTGLTRPKPVE

SEQ ID NO: 49947 - protein, 85 aa, Homo sapiens
LHREVEKVKLDQKRLDQELDFILSQQKELEDLLSPLEELVKEQSGTIYLQHADEEREKTYKLAENIDAQLKRMAQDLKDIIEHLN

SEQ ID NO: 49948 - protein, 84 aa, Homo sapiens
LESMMPNKVRKIGELVRYLNTNPVGGLLEYARSHGFAAEFKLVDQSGPPHEPKFVYQAKVGGRWFPAVCAHSKKQAPSHWQHLP

SEQ ID NO: 49949 - protein, 85 aa, Homo sapiens
LQITEWRFLARDEGESAVAEDPTWGEDEEPSACTTDSWAQGSVPVLHASTSEGLENFQGEVHSSGASPDSSAIAPALPFPTSHCP

SEQ ID NO: 49950 - protein, 85 aa, Homo sapiens
LESSGCKALKEGVLEKRSDGLLQLWKKKCCILTEEGLLLIPPKQLQHQQQQQQQQQQQQQQQPGQGPAEPSQPSGPAVASLEPPV

SEQ ID NO: 49951 - protein, 7 aa, Homo sapiens
LLRMKIS

SEQ ID NO: 49952 - protein, 85 aa, Homo sapiens
LQQQVVWGNRNRNLSGGVLMGFMLNRINQEATPGDIVEKLGADAKILSNVISKSTRPNTLDIGKPPLRSKRDSLEKESSDDDTPF

SEQ ID NO: 49953 - protein, 85 aa, Homo sapiens
LGSRDLARNPHTLVEVTSFAAINKFQPFNVAVSSNVLFLLVCGPPCLGARGSGAQSVGSGRGSPAYQLHESWGLVCFVCYWYTVG

SEQ ID NO: 49954 - protein, 85 aa, Homo sapiens
LIMGRGYHYATCLEGALKIKEITYMHSEGILAGELKHGPLALVDKLMPVIMIIMRDHTYAKCQNALQQVVARQGRPVVICDKEDT

SEQ ID NO: 49955 - protein, 85 aa, Homo sapiens
LFGTQNTSPSSPAAPAASSASPMFKPIFTAPPKSEKEGLTPPGPSVSATAPSSSSLPTTTSTTAPTFQPVFSSMGPPASVPLPAP

SEQ ID NO: 49956 - protein, 85 aa, Homo sapiens
LPAAATASPPTSLLAPSTNPLLESLKKMQTPPSLPPCPESAGAATTEALSPPKTPSLLPPLGLSQSGPPGLLPSPSFDSKPPTTL

SEQ ID NO: 49957 - protein, 85 aa, Homo sapiens
LGLIPAPSMVPATDTKAPPTLQAETATKPQATSAPSPAPKQSFLFGTQNTSPSSPAAPAASSASPMFKPIFTAPPKSEKEGLTPP

SEQ ID NO: 49958 - protein, 85 aa, Homo sapiens
LGVGDTLYLVNGLHPLTLRWEETRTPESQPDTPPGTPLVSQDEKRDAELPKKRMRKSNPGWENLEKLLVFTAAGVKPQGKDLVPR

SEQ ID NO: 49959 - protein, 85 aa, Homo sapiens
LTSSAEEPWKNQLSNSTQGLHKGQSSHSAGPNGERPLSSTGPSQHLQAAGSGIQNQNGHPTLPSNSVTQGAALNHLSSHTATSGG

SEQ ID NO: 49960 - protein, 85 aa, Homo sapiens
LDSDSKSVGSFNPNGWQQITKDSEFISASCEQQQDISVMTIPEHSDINDLEKSVWELEGMPQDTYSQQLHSQIQESSLNQIQAHS

SEQ ID NO: 49961 - protein, 85 aa, Homo sapiens
LRDYQFKRLKYYYAVVDCDSPETASKIYEDCDGLEFESSCSFIDLRFIPDDITFDDEPKDVASEVNLTAYKPKYFTSAAMGTSTV

SEQ ID NO: 49962 - protein, 85 aa, Homo sapiens
LSLVGWYHSHPHSPALPSLQDIDAQMDYQLRLQGSSNGFQPCLALLCSPYYSGNPGPESKISPFWVMPPPEQRPSDYGIPMDVEM

SEQ ID NO: 49963 - protein, 85 aa, Homo sapiens
LDGTLITTRSGKVFPTGPSDWRILYPEIPRKLRELEAEGYKVLVATHAGLYRKPVTGMWDHLQEQANDGTPISIGDSIFVGDAAG

SEQ ID NO: 49964 - protein, 85 aa, Homo sapiens
LVATHAGLYRKPVTGMWDHLQEQANDGTPISIGDSIFVGDAAGRPANWAPGRKKKDFSCADRLFALNLGLPFATPEEFFLKWPAA

SEQ ID NO: 49965 - protein, 85 aa, Homo sapiens
LLMIISQKDTFHSFFQHFSYNHMMEKIKSYVNYVLSEKSSTFLMKAAAKVVESKRTRTITSQDKPSGNDVEMETEANLDTRKRIA

SEQ ID NO: 49966 - protein, 85 aa, Homo sapiens
LDRLLTEMDNKLDRLELDPVKQLLEDRWKSLRQQLRERPPLYQADEAAAMRRQLLAHFHCLSCDRPLETPVTGHAIPVTPAGPGL

SEQ ID NO: 49967 - protein, 85 aa, Homo sapiens
LSTGLGSTHPDQQHVASPGPGEHDQVYPDAAQHGHAFSLFDSHDSMYPGYRGPGYLSADQHGQEGLDPNRTRASDRHGIPAQKAP

SEQ ID NO: 49968 - protein, 85 aa, Homo sapiens
LAQMVKRTIPPELQEQLKTVKTLAKEVWQEKAKVERLQRILEGEGNQEAGKELKAGELRLQLGVLRVTVADIEKELAELRESQDR

SEQ ID NO: 49969 - protein, 85 aa, Homo sapiens
LYPTEEIQIAMKHDEVDILGLDGHIYKGRMDTRLPGILRKDSSGTSKRKSQQPRPHVHRPPSLSSNGQLPSRPQSAQISAGNTSE

SEQ ID NO: 49970 - protein, 84 aa, Homo sapiens
LETHRKRKRSGNSDSIERDAAQEAEAGTGLEPGSNSGQCSVPLKKGKDAPIKKESLGHWSQGLKISMQDPKMQPCTSSCDQPGF

SEQ ID NO: 49971 - protein, 26 aa, Homo sapiens
LRMKKVRMTKISTSGELLAYQGTTVP

SEQ ID NO: 49972 - protein, 84 aa, Homo sapiens
LHTWIQDNGGWTETQDLFNSNACSPTPAALATTILLPASMNLTTLGTSHKWTHTCDWLVTLSMMSSRFIHVLACVTASFILKAE

SEQ ID NO: 49973 - protein, 85 aa, Homo sapiens
LGLSTYDFIKENGFLPFRLDHIRKMAYQICKSVNFLHSNKLTHTDLKPENILFVQSDYTEAYNPKIKRDERTLINPDIKVVDFGS

SEQ ID NO: 49974 - protein, 85 aa, Homo sapiens
LQALQKGERKKSCGGHCKKGKCESHQHGSEEREEGSQEQDELHHRDTKEEEPFESSSEEEFGGEDHQSLNSIVDVEDLGKIMDHV

SEQ ID NO: 49975 - protein, 85 aa, Homo sapiens
LSFPNLNQVLENYSDAPMTPKQILQVIEAEGLKEMRSGTSPLACLNAMLHSNSRGGEGLFYKLPGRISLFTLKKDALQWSRHPAT

SEQ ID NO: 49976 - protein, 85 aa, Homo sapiens
LGPSTNSMSGGVQTPREDWAPKPHAFVGSVKNEKTFVGGPLKANAENRKATGHSPLELVGHLEGMPFVMDLPFWKLPREPGKGLS

SEQ ID NO: 49977 - protein, 85 aa, Homo sapiens
LSTFPQHHHPGIPGVAHSVISTRTPPPPSPLPFPTQAILPPAPSSYFSHPTIRYPPHLNPQDTLKNYVPSYDPSSPQTSQPNGSG

SEQ ID NO: 49978 - protein, 85 aa, Homo sapiens; identical to SEQ ID NO: 45650

SEQ ID NO: 49979 - protein, 21 aa, Homo sapiens
LTAVEKCELAVRNRPREKWSS

SEQ ID NO: 49980 - protein, 85 aa, Homo sapiens; identical to SEQ ID NO: 45675

SEQ ID NO: 49981 - protein, 85 aa, Homo sapiens; identical to SEQ ID NO: 45678

SEQ ID NO: 49982 - protein, 85 aa, Homo sapiens; identical to SEQ ID NO: 45688

SEQ ID NO: 49983 - protein, 85 aa, Homo sapiens; identical to SEQ ID NO: 45723

SEQ ID NO: 49984 - protein, 85 aa, Homo sapiens; identical to SEQ ID NO: 45740

SEQ ID NO: 49985 - protein, 45 aa, Homo sapiens; identical to SEQ ID NO: 45745

SEQ ID NO: 49986 - protein, 85 aa, Homo sapiens; identical to SEQ ID NO: 45754

SEQ ID NO: 49987 - protein, 85 aa, Homo sapiens; identical to SEQ ID NO: 45758

SEQ ID NO: 49988 - protein, 85 aa, Homo sapiens; identical to SEQ ID NO: 45771

SEQ ID NO: 49989 - protein, 75 aa, Homo sapiens; identical to SEQ ID NO: 45778

SEQ ID NO: 49990 - protein, 40 aa, Homo sapiens; identical to SEQ ID NO: 45799

SEQ ID NO: 49991 - protein, 85 aa, Homo sapiens; identical to SEQ ID NO: 45850

SEQ ID NO: 49992 - protein, 85 aa, Homo sapiens; identical to SEQ ID NO: 45854

SEQ ID NO: 49993 - protein, 85 aa, Homo sapiens; identical to SEQ ID NO: 45923

SEQ ID NO: 49994 - protein, 85 aa, Homo sapiens; identical to SEQ ID NO: 45924

SEQ ID NO: 49995 - protein, 85 aa, Homo sapiens; identical to SEQ ID NO: 45957

SEQ ID NO: 49996 - protein, 85 aa, Homo sapiens; identical to SEQ ID NO: 45963

SEQ ID NO: 49997 - protein, 83 aa, Homo sapiens; identical to SEQ ID NO: 45981

SEQ ID NO: 49998 - protein, 34 aa, Homo sapiens; identical to SEQ ID NO: 46008

SEQ ID NO: 49999 - protein, 85 aa, Homo sapiens; identical to SEQ ID NO: 46018

SEQ ID NO: 50000 - protein, 84 aa, Homo sapiens; identical to SEQ ID NO: 46037

SEQ ID NO: 50001 - protein, 55 aa, Homo sapiens; identical to SEQ ID NO: 46040

SEQ ID NO: 50002 - protein, 85 aa, Homo sapiens; identical to SEQ ID NO: 46043

SEQ ID NO: 50003 - protein, 85 aa, Homo sapiens; identical to SEQ ID NO: 46046

SEQ ID NO: 50004 - protein, 85 aa, Homo sapiens; identical to SEQ ID NO: 46047

SEQ ID NO: 50005 - protein, 85 aa, Homo sapiens; identical to SEQ ID NO: 46080

SEQ ID NO: 50006 - protein, 85 aa, Homo sapiens; identical to SEQ ID NO: 46105

SEQ ID NO: 50007 - protein, 65 aa, Homo sapiens; identical to SEQ ID NO: 46122

SEQ ID NO: 50008 - protein, 18 aa, Homo sapiens
LSENEDIGLLRLGHQEVD

SEQ ID NO: 50009 - protein, 85 aa, Homo sapiens; identical to SEQ ID NO: 46220

SEQ ID NO: 50010 - protein, 85 aa, Homo sapiens; identical to SEQ ID NO: 46223

SEQ ID NO: 50011 - protein, 85 aa, Homo sapiens; identical to SEQ ID NO: 46225

SEQ ID NO: 50012 - protein, 85 aa, Homo sapiens; identical to SEQ ID NO: 46232

SEQ ID NO: 50013 - protein, 48 aa, Homo sapiens; identical to SEQ ID NO: 46245

SEQ ID NO: 50014 - protein, 32 aa, Homo sapiens; identical to SEQ ID NO: 46256

SEQ ID NO: 50015 - protein, 20 aa, Homo sapiens
LCSITNKESIVCRNLHGECY

SEQ ID NO: 50016 - protein, 85 aa, Homo sapiens; identical to SEQ ID NO: 46274

SEQ ID NO: 50017 - protein, 85 aa, Homo sapiens; identical to SEQ ID NO: 46277

SEQ ID NO: 50018 - protein, 85 aa, Homo sapiens; identical to SEQ ID NO: 46282

SEQ ID NO: 50019 - protein, 85 aa, Homo sapiens; identical to SEQ ID NO: 46284

SEQ ID NO: 50020 - protein, 85 aa, Homo sapiens; identical to SEQ ID NO: 46316

SEQ ID NO: 50021 - protein, 85 aa, Homo sapiens; identical to SEQ ID NO: 46321

SEQ ID NO: 50022 - protein, 85 aa, Homo sapiens; identical to SEQ ID NO: 46363

SEQ ID NO: 50023 - protein, 85 aa, Homo sapiens; identical to SEQ ID NO: 46365

SEQ ID NO: 50024 - protein, 85 aa, Homo sapiens; identical to SEQ ID NO: 46382

SEQ ID NO: 50025 - protein, 85 aa, Homo sapiens; identical to SEQ ID NO: 46404

SEQ ID NO: 50026 - protein, 10 aa, Homo sapiens
LPLSKWDVVS

SEQ ID NO: 50027 - protein, 85 aa, Homo sapiens; identical to SEQ ID NO: 46432

SEQ ID NO: 50028 - protein, 85 aa, Homo sapiens; identical to SEQ ID NO: 46451

SEQ ID NO: 50029 - protein, 15 aa, Homo sapiens
LERSHFRKLRTSATK

SEQ ID NO: 50030 - protein, 85 aa, Homo sapiens; identical to SEQ ID NO: 46506

SEQ ID NO: 50031 - protein, 85 aa, Homo sapiens; identical to SEQ ID NO: 46606

SEQ ID NO: 50032 - protein, 85 aa, Homo sapiens; identical to SEQ ID NO: 46624
